(19) United States
(12) Patent Application Publication
(10) Pub. No.: US 2002/0022591 A1
(43) Pub. Date: Feb. 21, 2002

(54) Compositions and methods for the therapy and diagnosis of ovarian cancer

(76) Inventors: Paul A. Algate, Issaquah, WA (US); Jane Mannion, Edmonds, WA (US)

Correspondence Address: Jane E. R. Potter, Esq., Seed Intellectual Property Law Group PLLC, Suite 6300, 701 Fifth Avenue, Seattle, WA, 98104-7092, US

(21) Appl. No.: 09/777,564

(22) Filed: Feb. 5, 2001

Related U.S. Application Data
(60) Provisional application No. 60/180,403, filed on Feb. 4, 2000.
(60) Provisional application No. 60/192,745, filed on Mar. 28, 2000.

(51) Int. Cl. A61K 48/00; A61K 38/00; C07H 21/04; C12P 21/02; C12Q 1/68

(52) U.S. Cl. 514/12; 514/44; 436/6; 435/69.1; 536/23.1; 530/350; 435/6

(57) ABSTRACT

Compositions and methods for the therapy and diagnosis of cancer, such as ovarian cancer, are disclosed. Compositions may comprise one or more ovarian tumor proteins, immunogenic portions thereof, or polynucleotides that encode such portions. Alternatively, a therapeutic composition may comprise an antigen presenting cell that expresses an ovarian tumor protein, or a T cell that is specific for cells expressing such a protein. Such compositions may be used, for example, for the prevention and treatment of diseases such as ovarian cancer. Diagnostic methods based on detecting an ovarian tumor protein, or mRNA encoding such a protein, in a sample are also provided.

### CROSS REFERENCE TO RELATED APPLICATIONS

[0001] This application is related to U.S. Provisional Application No. 60/180,403, filed Feb. 4, 2000, and U.S. Provisional Application No. 60/192,745, filed Mar. 28, 2000, and are incorporated in their entirety herein.

### TECHNICAL FIELD OF THE INVENTION

[0002] The present invention relates generally to therapy and diagnosis of cancer, such as ovarian tumors. The invention is more specifically related to polypeptides comprising at least a portion of an ovarian tumor protein, and to polynucleotides encoding such polypeptides. Such polypeptides and polynucleotides may be used in vaccines and pharmaceutical compositions for prevention and treatment of ovarian tumors, and for the diagnosis and monitoring of such cancers.

### BACKGROUND OF THE INVENTION

[0003] Cancer is a significant health problem throughout the world. Although advances have been made in detection and therapy of cancer, no vaccine or other universally successful method for prevention or treatment is currently available. Current therapies, which are generally based on a combination of chemotherapy or surgery and radiation, continue to prove inadequate in many patients.

[0004] Management of ovarian cancer currently relies on a combination of early diagnosis and aggressive treatment, which may include one or more of a variety of treatments such as surgery, radiotherapy, chemotherapy and hormone therapy. The course of treatment for a particular cancer is often selected based on a variety of prognostic parameters, including an analysis of specific tumor markers. However, the use of established markers often leads to a result that is difficult to interpret, and high mortality continues to be observed in many cancer patients.

[0005] Immunotherapies have the potential to substantially improve cancer treatment and survival. Such therapies may involve the generation or enhancement of an immune response to an ovarian carcinoma antigen. However, to date, relatively few ovarian carcinoma antigens are known and the generation of an immune response against such antigens has not been shown to be therapeutically beneficial. Thus, in spite of considerable research into therapies for these cancers, ovarian tumors remain difficult to diagnose and treat effectively. Accordingly, there is a need in the art for improved methods for detecting and treating such cancers. The present invention fulfills these needs and further provides other related advantages.

### SUMMARY OF THE INVENTION

[0006] Briefly stated, the present invention provides compositions and methods for the diagnosis and therapy of cancer, such as ovarian cancer. In one aspect, the present invention provides polypeptides comprising at least a portion of an ovarian tumor protein, or a variant thereof. Certain portions and other variants are immunogenic, such that the ability of the variant to react with antigen-specific antisera is not substantially diminished. Within certain embodiments, the polypeptide comprises a sequence that is encoded by a polynucleotide sequence selected from the group consisting of: (a) sequences recited in SEQ ID NOs:1413-1508; (b) variants of a sequence recited in SEQ ID NO:1413-1508; and (c) complements of a sequence of (a) or (b).

[0007] The present invention further provides polynucleotides that encode a polypeptide as described above, or a portion thereof (such as a portion encoding at least 15 amino acid residues of an ovarian tumor protein), expression vectors comprising such polynucleotides and host cells transformed or transfected with such expression vectors.

[0008] Within other aspects, the present invention provides pharmaceutical compositions comprising a polypeptide or polynucleotide as described above and a physiologically acceptable carrier.

[0009] Within a related aspect of the present invention, vaccines for prophylactic or therapeutic use are provided. Such vaccines comprise a polypeptide or polynucleotide as described above and an immunostimulant.

[0010] The present invention further provides pharmaceutical compositions that comprise: (a) an antibody or antigen-binding fragment thereof that specifically binds to an ovarian tumor protein; and (b) a physiologically acceptable carrier.

[0011] Within further aspects, the present invention provides pharmaceutical compositions comprising: (a) an antigen presenting cell that expresses a polypeptide as described above and (b) a pharmaceutically acceptable carrier or excipient. Antigen presenting cells include dendritic cells, macrophages, monocytes, fibroblasts and B cells.

[0012] Within related aspects, vaccines are provided that comprise: (a) an antigen presenting cell that expresses a polypeptide as described above and (b) an immunostimulant.

[0013] The present invention further provides, in other aspects, fusion proteins that comprise at least one polypeptide as described above, as well as polynucleotides encoding such fusion proteins.

[0014] Within related aspects, pharmaceutical compositions comprising a fusion protein, or a polynucleotide encoding a fusion protein, in combination with a physiologically acceptable carrier are provided.

[0015] Vaccines are further provided, within other aspects, that comprise a fusion protein, or a polynucleotide encoding a fusion protein, in combination with an immunostimulant.

[0016] Within further aspects, the present invention provides methods for inhibiting the development of a cancer in a patient, comprising administering to a patient a pharmaceutical composition or vaccine as recited above. The patient may be afflicted with ovarian cancer, in which case the methods provide treatment for the disease, or patient considered at risk for such a disease may be treated prophylactically.

[0017] The present invention further provides, within other aspects, methods for removing tumor cells from a biological sample, comprising contacting a biological sample with T cells that specifically react with an ovarian tumor protein, wherein the step of contacting is performed under conditions and for a time sufficient to permit the removal of cells expressing the protein from the sample.

[0018] Within related aspects, methods are provided for inhibiting the development of a cancer in a patient, comprising administering to a patient a biological sample treated as described above.

[0019] Methods are further provided, within other aspects, for stimulating and/or expanding T cells specific for an ovarian tumor protein, comprising contacting T cells with one or more of: (i) a polypeptide as described above; (ii) a polynucleotide encoding such a polypeptide; and/or (iii) an antigen presenting cell that expresses such a polypeptide; under conditions and for a time sufficient to permit the stimulation and/or expansion of T cells. Isolated T cell populations comprising T cells prepared as described above are also provided.

[0020] Within further aspects, the present invention provides methods for inhibiting the development of a cancer in a patient, comprising administering to a patient an effective amount of a T cell population as described above.

[0021] The present invention further provides methods for inhibiting the development of a cancer in a patient, comprising the steps of: (a) incubating CD4⁺ and/or CD8⁺ T cells isolated from a patient with one or more of: (i) a polypeptide comprising at least an immunogenic portion of an ovarian tumor protein; (ii) a polynucleotide encoding such a polypeptide; and (iii) an antigen-presenting cell that expressed such a polypeptide; and (b) administering to the patient an effective amount of the proliferated T cells, and thereby inhibiting the development of a cancer in the patient. Proliferated cells may, but need not, be cloned prior to administration to the patient.

[0022] Within further aspects, the present invention provides methods for determining the presence or absence of a cancer in a patient, comprising: (a) contacting a biological sample obtained from a patient with a binding agent that binds to a polypeptide as recited above; (b) detecting in the sample an amount of polypeptide that binds to the binding agent; and (c) comparing the amount of polypeptide with a predetermined cut-off value, and therefrom determining the presence or absence of a cancer in the patient. Within preferred embodiments, the binding agent is an antibody, more preferably a monoclonal antibody. The cancer may be ovarian cancer.

[0023] The present invention also provides, within other aspects, methods for monitoring the progression of a cancer in a patient. Such methods comprise the steps of: (a) contacting a biological sample obtained from a patient at a first point in time with a binding agent that binds to a polypeptide as recited above; (b) detecting in the sample an amount of polypeptide that binds to the binding agent; (c) repeating steps (a) and (b) using a biological sample obtained from the patient at a subsequent point in time; and (d) comparing the amount of polypeptide detected in step (c) with the amount detected in step (b) and therefrom monitoring the progression of the cancer in the patient.

[0024] The present invention further provides, within other aspects, methods for determining the presence or absence of a cancer in a patient, comprising the steps of: (a) contacting a biological sample obtained from a patient with an oligonucleotide that hybridizes to a polynucleotide that encodes an ovarian tumor protein; (b) detecting in the sample a level of a polynucleotide, preferably mRNA, that hybridizes to the oligonucleotide; and (c) comparing the level of polynucleotide that hybridizes to the oligonucleotide with a predetermined cut-off value, and therefrom determining the presence or absence of a cancer in the patient. Within certain embodiments, the amount of mRNA is detected via polymerase chain reaction using, for example, at least one oligonucleotide primer that hybridizes to a polynucleotide encoding a polypeptide as recited above, or a complement of such a polynucleotide. Within other embodiments, the amount of mRNA is detected using a hybridization technique, employing an oligonucleotide probe that hybridizes to a polynucleotide that encodes a polypeptide as recited above, or a complement of such a polynucleotide.

[0025] In related aspects, methods are provided for monitoring the progression of a cancer in a patient, comprising the steps of: (a) contacting a biological sample obtained from a patient with an oligonucleotide that hybridizes to a polynucleotide that encodes an ovarian tumor protein; (b) detecting in the sample an amount of a polynucleotide that hybridizes to the oligonucleotide; (c) repeating steps (a) and (b) using a biological sample obtained from the patient at a subsequent point in time; and (d) comparing the amount of polynucleotide detected in step (c) with the amount detected in step (b) and therefrom monitoring the progression of the cancer in the patient.

[0026] Within further aspects, the present invention provides antibodies, such as monoclonal antibodies, that bind to a polypeptide as described above, as well as diagnostic kits comprising such antibodies. Diagnostic kits comprising one or more oligonucleotide probes or primers as described above are also provided.

[0027] These and other aspects of the present invention will become apparent upon reference to the following detailed description. All references disclosed herein are hereby incorporated by reference in their entirety as if each was incorporated individually.

### DETAILED DESCRIPTION OF THE INVENTION

[0028] As noted above, the present invention is generally directed to compositions and methods for using the compositions, for example in the therapy and diagnosis of cancer, such as ovarian cancer. Certain illustrative compositions described herein include ovarian tumor polypeptides, polynucleotides encoding such polypeptides, binding agents such as antibodies, antigen presenting cells (APCs) and/or immune system cells (e.g., T cells). An “ovarian tumor protein,” as the term is used herein, refers generally to a protein that is expressed in ovarian tumor cells at a level that is at least two fold, and preferably at least five fold, greater than the level of expression in a normal tissue, as determined using a representative assay provided herein. Certain ovarian tumor proteins are tumor proteins that react detectably (within an immunoassay, such as an ELISA or Western blot) with antisera of a patient afflicted with ovarian cancer.

[0029] Therefore, in accordance with the above, and as described further below, the present invention provides illustrative polynucleotide compositions having sequences set forth in SEQ ID Nos:1-1730, illustrative polypeptide compositions encoded by polynucleotides having the sequences set forth in SEQ ID Nos:1-1730, antibody compositions capable of binding such polypeptides, and numerous additional embodiments employing such compositions, for example in the detection, diagnosis and/or therapy of human ovarian cancer.

[0030] Polynucleotide Compositions

[0031] As used herein, the terms “DNA segment” and “polynucloetide” refer to a DNA molecule that has been isolated free of total genomic DNA of a particular species. Therefore, a DNA segment encoding a polypeptide refers to a DNA segment that contains one or more coding sequences yet is substantially isolated away from, or purified free from, total genomic DNA of the species from which the DNA segment is obtained. Included within the terms “DNA segment” and “polynucleotide” are DNA segments and smaller fragments of such segments, and also recombinant vectors, including, for example, plasmids, cosmids, phagemids, phage, viruses, and the like.

[0032] As will be understood by those skilled in the art, the DNA segments of this invention can include genomic sequences, extra-genomic and plasmid-encoded sequences and smaller engineered gene segments that express, or may be adapted to express, proteins, polypeptides, peptides and the like. Such segments may be naturally isolated, or modified synthetically by the hand of man.

[0033] “Isolated,” as used herein, means that a polynucleotide is substantially away from other coding sequences, and that the DNA segment does not contain large portions of unrelated coding DNA, such as large chromosomal fragments or other functional genes or polypeptide coding regions. Of course, this refers to the DNA segment as originally isolated, and does not exclude genes or coding regions later added to the segment by the hand of man.

[0034] As will be recognized by the skilled artisan, polynucleotides may be single-stranded (coding or antisense) or double-stranded, and may be DNA (genomic, cDNA or synthetic) or RNA molecules. RNA molecules include mRNA molecules, which contain introns and correspond to a DNA molecule in a one-to-one manner, and mRNA molecules, which do not contain introns. Additional coding or non-coding sequences may, but need not, be present within a polynucleotide of the present invention, and a polynucleotide may, but need not, be linked to other molecules and/or support materials.

[0035] Polynucleotides may comprise a native sequence (i.e., an endogenous sequence that encodes an ovarian tumor protein or a portion thereof) or may comprise a variant or a biological or antigenic functional equivalent of such a sequence. Polynucleotide variants may contain one or more substitutions, additions, deletions and/or insertions, as further described below, preferably such that the immunogenicity of the encoded polypeptide is not diminished, relative to a native tumor protein. The effect on the immunogenicity of the encoded polypeptide may generally be assessed as described herein. The term “variants” also encompasses homologous genes of xenogenic origin.

[0036] When comparing polynucleotide or polypeptide sequences, two sequences are said to be “identical” if the sequence of nucleotides or amino acids in the two sequences is the same when aligned for maximum correspondence, as described below. Comparisons between two sequences are typically performed by comparing the sequences over a comparison window to identify and compare local regions of sequence similarity. A “comparison window” as used herein, refers to a segment of at least about 20 contiguous positions, usually 30 to about 75, 40 to about 50, in which a sequence may be compared to a reference sequence of the same number of contiguous positions after the two sequences are optimally aligned.

[0037] Optimal alignment of sequences for comparison may be conducted using the Megalign program in the Lasergene suite of bioinformatics software (DNASTAR, Inc., Madison, Wis.), using default parameters. This program embodies several alignment schemes described in the following references: Dayhoff, M. O. (1978) A model of evolutionary change in proteins—Matrices for detecting distant relationships. In Dayhoff, M. O. (ed.) Atlas of Protein Sequence and Structure, National Biomedical Research Foundation, Washington DC Vol. 5, Suppl. 3, pp. 345-358; Hein J. (1990) Unified Approach to Alignment and Phylogenes pp. 626-645 Methods in Enzymology vol. 183, Academic Press, Inc., San Diego, Calif.; Higgins, D. G. and Sharp, P. M. (1989) CABIOS 5:151-153; Myers, E. W. and Muller W. (1988) CABIOS 4:11-17; Robinson, E. D. (1971) Comb. Theor 11:105; Saitou, N. Nei, M. (1987) Mol. Biol. Evol. 4:406-425; Sneath, P. H. A. and Sokal, R. R. (1973) Numerical Taxonomy—the Principles and Practice of Numerical Taxonomy, Freeman Press, San Francisco, Calif.; Wilbur, W. J. and Lipman, D. J. (1983) Proc. Natl. Acad., Sci. USA 80:726-730.

[0038] Alternatively, optimal alignment of sequences for comparison may be conducted by the local identity algorithm of Smith and Waterman (1981) Add. APL. Math 2:482, by the identity alignment algorithm of Needleman and Wunsch (1970) J. Mol. Biol. 48:443, by the search for similarity methods of Pearson and Lipman (1988) Proc. Natl. Acad. Sci. (U.S.A.) 85: 2444, by computerized implementations of these algorithms (GAP, BESTFIT, BLAST, FASTA, and TFASTA in the Wisconsin Genetics Software Package, Genetics Computer Group (GCG), 575 Science Dr., Madison, Wis.), or by inspection.

[0039] One preferred example of algorithms that are suitable for determining percent sequence identity and sequence similarity are the BLAST and BLAST 2.0 algorithms, which are described in Altschul et al. (1977) Nuc. Acids Res. 25:3389-3402 and Altschul et al. (1990) J. Mol. Biol. 215:403-410, respectively. BLAST and BLAST 2.0 can be used, for example with the parameters described herein, to determine percent sequence identity for the polynucleotides and polypeptides of the invention. Software for performing BLAST analyses is publicly available through the National Center for Biotechnology Information (http://www.ncbi.nlm.nih.gov/) In one illustrative example, cumulative scores can be calculated using, for nucleotide sequences, the parameters M (reward score for a pair of matching residues; always >0) and N (penalty score for mismatching residues; always <0). For amino acid sequences, a scoring matrix can be used to calculate the cumulative score. Extension of the word hits in each direction are halted when: the cumulative alignment score falls off by the quantity X from its maximum achieved value; the cumulative score goes to zero or below, due to the accumulation of one or more negative-scoring residue alignments; or the end of either sequence is reached. The BLAST algorithm parameters W, T and X determine the sensitivity and speed of the alignment. The BLASTN program (for nucleotide sequences) uses as defaults a wordlength (W) of 11, and expectation (E) of 10, and the BLOSUM62 scoring matrix (see Henikoff and Henikoff (1989) Proc. Natl. Acad. Sci. USA 89:10915) alignments, (B) of 50, expectation (E) of 10, M=5, N=-4 and a comparison of both strands.

[0040] Preferably, the “percentage of sequence identity” is determined by comparing two optimally aligned sequences over a window of comparison of at least 20 positions, wherein the portion of the polynucleotide or polypeptide sequence in the comparison window may comprise additions or deletions (i.e., gaps) of 20 percent or less, usually 5 to 15 percent, or 10 to 12 percent, as compared to the reference sequences (which does not comprise additions or deletions) for optimal alignment of the two sequences. The percentage is calculated by determining the number of positions at which the identical nucleic acid bases or amino acid residue occurs in both sequences to yield the number of matched positions, dividing the number of matched positions by the total number of positions in the reference sequence (i.e., the window size) and multiplying the results by 100 to yield the percentage of sequence identity.

[0041] Therefore, the present invention encompasses polynucleotide and polypeptide sequences having substantial identity to the sequences disclosed herein, for example those comprising at least 50% or more sequence identity, preferably at least 55%, 60%, 65%, 70%, 75%, 80%, 85%, 90%, 95%, 96%, 97%, 98%, or 99% or higher, sequence identity compared to a polynucleotide or polypeptide sequence of this invention using the methods described herein, (e.g., BLAST analyisis using standard parameters, as described below). One skilled in this art will recognize that these values can be appropriately adjusted to determine corresponding identity of proteins encoded by two nucleotide sequences by taking into account codon degeneracy, amino acid similarity, reading frame positioning and the like.

[0042] In additional embodiments, the present invention provides isolated polynucleotides and polypeptides comprising various lengths of contiguous stretches of sequence identical to or complementary to one or more of the sequences disclosed herein. For example, polynucleotides are provided by this invention that comprise at least about 15, 20, 30, 40, 50, 75, 100, 150, 200, 300, 400, 500 or 1000 or more contiguous nucleotides of one or more of the sequences disclosed herein as well as all intermediate lengths therebetween. It will be readily understood that “intermediate lengths”, in this context, means any length between the quoted values, such as 16, 17, 18, 19, etc.; 21, 22, 23, etc.; 30, 31, 32, etc.; 50, 51, 52, 53, etc.; 100, 101, 102, 103, etc.; 150, 151, 152, 153, etc.; including all integers through the 200-500; 500-1,000, and the like.

[0043] The polynucleotides of the present invention, or fragments thereof, regardless of the length of the coding sequence itself, may be combined with other DNA sequences, such as promoters, polyadenylation signals, additional restriction enzyme sites, multiple cloning sites, other coding segments, and the like, such that their overall length may vary considerably. It is therefore contemplated that a nucleic acid fragment of almost any length may be employed, with the total length preferably being limited by the ease of preparation and use in the intended recombinant DNA protocol. For example, illustrative DNA segments with total lengths of about 10,000, about 5000, about 3000, about 2,000, about 1,000, about 500, about 200, about 100, about 50 base pairs in length, and the like, (including all intermediate lengths) are contemplated to be useful in many implementations of this invention.

[0044] In other embodiments, the present invention is directed to polynucleotides that are capable of hybridizing under moderately stringent conditions to a polynucleotide sequence provided herein, or a fragment thereof, or a complementary sequence thereof. Hybridization techniques are well known in the art of molecular biology. For purposes of illustration, suitable moderately stringent conditions for testing the hybridization of a polynucleotide of this invention with other polynucleotides include prewashing in a solution of 5×SSC, 0.5% SDS, 1.0 mM EDTA (pH 8.0); hybridizing at 50° C.-65° C., 5×SSC, overnight; followed by washing twice at 65° C. for 20 minutes with each of 2×, 0.5×and 0.2×SSC containing 0.1% SDS.

[0045] Moreover, it will be appreciated by those of ordinary skill in the art that, as a result of the degeneracy of the genetic code, there are many nucleotide sequences that encode a polypeptide as described herein. Some of these polynucleotides bear minimal homology to the nucleotide sequence of any native gene. Nonetheless, polynucleotides that vary due to differences in codon usage are specifically contemplated by the present invention. Further, alleles of the genes comprising the polynucleotide sequences provided herein are within the scope of the present invention. Alleles are endogenous genes that are altered as a result of one or more mutations, such as deletions, additions and/or substitutions of nucleotides. The resulting mRNA and protein may, but need not, have an altered structure or function. Alleles may be identified using standard techniques (such as hybridization, amplification and/or database sequence comparison).

[0046] Probes and Primers

[0047] In other embodiments of the present invention, the polynucleotide sequences provided herein can be advantageously used as probes or primers for nucleic acid hybridization. As such, it is contemplated that nucleic acid segments that comprise a sequence region of at least about a 15 nucleotide long contiguous sequence that has the same sequence as, or is complementary to, a 15 nucleotide long contiguous sequence disclosed herein will find particular utility. Longer contiguous identical or complementary sequences, e.g., those of about 20, 30, 40, 50, 100, 200, 500, 1000 (including all intermediate lengths) and even up to full length sequences will also be of use in certain embodiments.

[0048] The ability of such nucleic acid probes to specifically hybridize to a sequence of interest will enable them to be of use in detecting the presence of complementary sequences in a given sample. However, other uses are also envisioned, such as the use of the sequence information for the preparation of mutant species primers, or primers for use in preparing other genetic constructions.

[0049] Polynucleotide molecules having sequence regions consisting of contiguous nucleotide stretches of 10-14, 15-20, 30, 50, or even of 100-200 nucleotides or so (including intermediate lengths as well), identical or complementary to SEQ ID NOs:1-1730, are particularly contemplated as hybridization probes for use in, e.g., Southern and Northern blotting. This would allow a gene product, or fragment thereof, to be analyzed, both in diverse cell types and also in various bacterial cells. The total size of fragment, as well as the size of the complementary stretch(es), will ultimately depend on the intended use or application of the particular nucleic acid segment. Smaller fragments will generally find use in hybridization embodiments, wherein the length of the contiguous complementary region may be varied, such as between about 15 and about 100 nucleotides, but larger contiguous complementarity stretches may be used, according to the length complementary sequences one wishes to detect.

[0050] The use of a hybridization probe of about 15-25 nucleotides in length allows the formation of a duplex molecule that is both stable and selective. Molecules having contiguous complementary sequences over stretches greater than 15 bases in length are generally preferred, though, in order to increase stability and selectivity of the hybrid, and thereby improve the quality and degree of specific hybrid molecules obtained. One will generally prefer to design nucleic acid molecules having gene-complementary stretches of 15 to 25 contiguous nucleotides, or even longer where desired.

[0051] Hybridization probes may be selected from any portion of any of the sequences disclosed herein. All that is required is to review the sequence set forth in SEQ ID NOs:1-1730, or to any continuous portion of the sequence, from about 15-25 nucleotides in length up to and including the full length sequence, that one wishes to utilize as a probe or primer. The choice of probe and primer sequences may be governed by various factors, such as, by way of example only, one may wish to employ primers from towards the termini of the total sequence.

[0052] Small polynucleotide segments or fragments may be readily prepared by, for example, directly synthesizing the fragment by chemical means, as is commonly practiced using an automated oligonucleotide synthesizer. Also, fragments may be obtained by application of nucleic acid reproduction technology, such as the PCR™ technology of U.S. Pat. No. 4,683,202 (incorporated herein by reference), by introducing selected sequences into recombinant vectors for recombinant production, and by other recombinant DNA techniques generally known to those of skill in the art of molecular biology.

[0053] The nucleotide sequences of the invention may be used for their ability to selectively form duplex molecules with complementary stretches of the entire gene or gene fragments of interest. Depending on the application envisioned, one will typically desire to employ varying conditions of hybridization to achieve varying degrees of selectivity of probe towards target sequence. For applications requiring high selectivity, one will typically desire to employ relatively stringent conditions to form the hybrids, e.g., one will select relatively low salt and/or high temperature conditions, such as provided by a salt concentration of from about 0.02 M to about 0.15 M salt at temperatures of from about 50° C. to about 70° C. Such selective conditions tolerate little, if any, mismatch between the probe and the template or target strand, and would be particularly suitable for isolating related sequences.

[0054] Of course, for some applications, for example, where one desires to prepare mutants employing a mutant primer strand hybridized to an underlying template, less stringent (reduced stringency) hybridization conditions will typically be needed in order to allow formation of the heteroduplex. In these circumstances, one may desire to employ salt conditions such as those of from about 0.15 M to about 0.9 M salt, at temperatures ranging from about 20° C. to about 55° C. Cross-hybridizing species can thereby be readily identified as positively hybridizing signals with respect to control hybridizations. In any case, it is generally appreciated that conditions can be rendered more stringent by the addition of increasing amounts of formamide, which serves to destabilize the hybrid duplex in the same manner as increased temperature. Thus, hybridization conditions can be readily manipulated, and thus will generally be a method of choice depending on the desired results.

[0055] Polynucleotide Identification and Characterization

[0056] Polynucleotides may be identified, prepared and/or manipulated using any of a variety of well established techniques. For example, a polynucleotide may be identified, as described in more detail below, by screening a microarray of cDNAs for tumor-associated expression (i.e., expression that is at least two fold greater in a tumor than in normal tissue, as determined using a representative assay provided herein). Such screens may be performed, for example, using a Synteni microarray (Palo Alto, Calif.) according to the manufacturer's instructions (and essentially as described by Schena et al., Proc. Natl. Acad. Sci. USA 93:10614-10619, 1996 and Heller et al., Proc. Natl. Acad. Sci. USA 94:2150-2155, 1997). Alternatively, polynucleotides may be amplified from cDNA prepared from cells expressing the proteins described herein, such as ovarian tumor cells. Such polynucleotides may be amplified via polymerase chain reaction (PCR). For this approach, sequence-specific primers may be designed based on the sequences provided herein, and may be purchased or synthesized.

[0057] An amplified portion of a polyncleotide of the present invention may be used to isolate a full length gene from a suitable library (e.g., an ovarian tumor cDNA library) using well known techniques. Within such techniques, a library (cDNA or genomic) is screened using one or more polynucleotide probes or primers suitable for amplification. Preferably, a library is size-selected to include larger molecules. Random primed libraries may also be preferred for identifying 5′ and upstream regions of genes. Genomic libraries are preferred for obtaining introns and extending 5′ sequences.

[0058] For hybridization techniques, a partial sequence may be labeled (e.g., by nick-translation or end-labeling with ³²p) using well known techniques. A bacterial or bacteriophage library is then generally screened by hybridizing filters containing denatured bacterial colonies (or lawns containing phage plaques) with the labeled probe (see Sambrook et al., Molecular Cloning: A Laboratory Manual, Cold Spring Harbor Laboratories, Cold Spring Harbor, N.Y., 1989). Hybridizing colonies or plaques are selected and expanded, and the DNA is isolated for further analysis. cDNA clones may be analyzed to determine the amount of additional sequence by, for example, PCR using a primer from the partial sequence and a primer from the vector. Restriction maps and partial sequences may be generated to identify one or more overlapping clones. The complete sequence may then be determined using standard techniques, which may involve generating a series of deletion clones. The resulting overlapping sequences can then assembled into a single contiguous sequence. A full length cDNA molecule can be generated by ligating suitable fragments, using well known techniques.

[0059] Alternatively, there are numerous amplification techniques for obtaining a full length coding sequence from a partial cDNA sequence. Within such techniques, amplification is generally performed via PCR. Any of a variety of commercially available kits may be used to perform the amplification step. Primers may be designed using, for example, software well known in the art. Primers are preferably 22-30 nucleotides in length, have a GC content of at least 50% and anneal to the target sequence at temperatures of about 68° C. to 72° C. The amplified region may be sequenced as described above, and overlapping sequences assembled into a contiguous sequence.

[0060] One such amplification technique is inverse PCR (see Triglia et al., Nucl. Acids Res. 16:8186, 1988), which uses restriction enzymes to generate a fragment in the known region of the gene. The fragment is then circularized by intramolecular ligation and used as a template for PCR with divergent primers derived from the known region. Within an alternative approach, sequences adjacent to a partial sequence may be retrieved by amplification with a primer to a linker sequence and a primer specific to a known region. The amplified sequences are typically subjected to a second round of amplification with the same linker primer and a second primer specific to the known region. A variation on this procedure, which employs two primers that initiate extension in opposite directions from the known sequence, is described in WO 96/38591. Another such technique is known as “rapid amplification of cDNA ends” or RACE. This technique involves the use of an internal primer and an external primer, which hybridizes to a polyA region or vector sequence, to identify sequences that are 5′ and 3′ of a known sequence. Additional techniques include capture PCR (Lagerstrom et al., PCR Methods Applic. 1:111-19, 1991) and walking PCR (Parker et al., Nucl. Acids. Res. 19:3055-60, 1991). Other methods employing amplification may also be employed to obtain a full length cDNA sequence.

[0061] In certain instances, it is possible to obtain a full length cDNA sequence by analysis of sequences provided in an expressed sequence tag (EST) database, such as that available from GenBank. Searches for overlapping ESTs may generally be performed using well known programs (e.g., NCBI BLAST searches), and such ESTs may be used to generate a contiguous full length sequence. Full length DNA sequences may also be obtained by analysis of genomic fragments.

[0062] Polynucleotide Expression In Host Cells

[0063] In other embodiments of the invention, polynucleotide sequences or fragments thereof which encode polypeptides of the invention, or fusion proteins or functional equivalents thereof, may be used in recombinant DNA molecules to direct expression of a polypeptide in appropriate host cells. Due to the inherent degeneracy of the genetic code, other DNA sequences that encode substantially the same or a functionally equivalent amino acid sequence may be produced and these sequences may be used to clone and express a given polypeptide.

[0064] As will be understood by those of skill in the art, it may be advantageous in some instances to produce polypeptide-encoding nucleotide sequences possessing non-naturally occurring codons. For example, codons preferred by a particular prokaryotic or eukaryotic host can be selected to increase the rate of protein expression or to produce a recombinant RNA transcript having desirable properties, such as a half-life which is longer than that of a transcript generated from the naturally occurring sequence.

[0065] Moreover, the polynucleotide sequences of the present invention can be engineered using methods generally known in the art in order to alter polypeptide encoding sequences for a variety of reasons, including but not limited to, alterations which modify the cloning, processing, and/or expression of the gene product. For example, DNA shuffling by random fragmentation and PCR reassembly of gene fragments and synthetic oligonucleotides may be used to engineer the nucleotide sequences. In addition, site-directed mutagenesis may be used to insert new restriction sites, alter glycosylation patterns, change codon preference, produce splice variants, or introduce mutations, and so forth.

[0066] In another embodiment of the invention, natural, modified, or recombinant nucleic acid sequences may be ligated to a heterologous sequence to encode a fusion protein. For example, to screen peptide libraries for inhibitors of polypeptide activity, it may be useful to encode a chimeric protein that can be recognized by a commercially available antibody. A fusion protein may also be engineered to contain a cleavage site located between the polypeptide-encoding sequence and the heterologous protein sequence, so that the polypeptide may be cleaved and purified away from the heterologous moiety.

[0067] Sequences encoding a desired polypeptide may be synthesized, in whole or in part, using chemical methods well known in the art (see Caruthers, M. H. et al. (1980) Nucl. Acids Res. Symp. Ser. 215-223, Horn, T. et al. (1980) Nucl. Acids Res. Symp. Ser. 225-232). Alternatively, the protein itself may be produced using chemical methods to synthesize the amino acid sequence of a polypeptide, or a portion thereof. For example, peptide synthesis can be performed using various solid-phase techniques (Roberge, J. Y. et al. (1995) Science 269:202-204) and automated synthesis maybe achieved, for example, using the ABI 431A Peptide Synthesizer (Perkin Elmer).

[0068] A newly synthesized peptide may be substantially purified by preparative high performance liquid chromatography (e.g., Creighton, T. (1983) Proteins, Structures and Molecular Principles, WH Freeman and Co., New York, N.Y.) or other comparable techniques available in the art. The composition of the synthetic peptides may be confirmed by amino acid analysis or sequencing (e.g., the Edman degradation procedure). Additionally, the amino acid sequence of a polypeptide, or any part thereof, may be altered during direct synthesis and/or combined using chemical methods with sequences from other proteins, or any part thereof, to produce a variant polypeptide.

[0069] In order to express a desired polypeptide, the nucleotide sequences encoding the polypeptide, or functional equivalents, may be inserted into appropriate expression vector, i.e., a vector which contains the necessary elements for the transcription and translation of the inserted coding sequence. Methods which are well known to those skilled in the art may be used to construct expression vectors containing sequences encoding a polypeptide of interest and appropriate transcriptional and translational control elements. These methods include in vitro recombinant DNA techniques, synthetic techniques, and in vivo genetic recombination. Such techniques are described in Sambrook, J. et al. (1989) Molecular Cloning, A Laboratory Manual, Cold Spring Harbor Press, Plainview, N.Y., and Ausubel, F. M. et al. (1989) Current Protocols in Molecular Biology, John Wiley & Sons, New York. N.Y.

[0070] A variety of expression vector/host systems may be utilized to contain and express polynucleotide sequences. These include, but are not limited to, microorganisms such as bacteria transformed with recombinant bacteriophage, plasmid, or cosmid DNA expression vectors; yeast transformed with yeast expression vectors; insect cell systems infected with virus expression vectors (e.g., baculovirus); plant cell systems transformed with virus expression vectors (e.g., cauliflower mosaic virus, CaMV; tobacco mosaic virus, TMV) or with bacterial expression vectors (e.g., Ti or pBR322 plasmids); or animal cell systems.

[0071] The “control elements” or “regulatory sequences” present in an expression vector are those non-translated regions of the vector—enhancers, promoters, 5′ and 3′ untranslated regions—which interact with host cellular proteins to carry out transcription and translation. Such elements may vary in their strength and specificity. Depending on the vector system and host utilized, any number of suitable transcription and translation elements, including constitutive and inducible promoters, may be used. For example, when cloning in bacterial systems, inducible promoters such as the hybrid lacZ promoter of the PBLUESCRIPT phagemid (Stratagene, LaJolla, Calif.) or PSPORT1 plasmid (Gibco BRL) and the like may be used. In mammalian cell systems, promoters from mammalian genes or from mammalian viruses are generally preferred. If it is necessary to generate a cell line that contains multiple copies of the sequence encoding a polypeptide, vectors based on SV40 or EBV may be advantageously used with an appropriate selectable marker.

[0072] In bacterial systems, a number of expression vectors may be selected depending upon the use intended for the expressed polypeptide. For example, when large quantities are needed, for example for the induction of antibodies, vectors which direct high level expression of fusion proteins that are readily purified may be used. Such vectors include, but are not limited to, the multifunctional E. coli cloning and expression vectors such as BLUESCRIPT (Stratagene), in which the sequence encoding the polypeptide of interest may be ligated into the vector in frame with sequences for the amino-terminal Met and the subsequent 7 residues of .beta.-galactosidase so that a hybrid protein is produced; pIN vectors (Van Heeke, G. and S. M. Schuster (1989) J. Biol. Chem. 264:5503-5509); and the like. pGEX vectors (Promega, Madison, Wis.) may also be used to express foreign polypeptides as fusion proteins with glutathione S-transferase (GST). In general, such fusion proteins are soluble and can easily be purified from lysed cells by adsorption to glutathione-agarose beads followed by elution in the presence of free glutathione. Proteins made in such systems may be designed to include heparin, thrombin, or factor XA protease cleavage sites so that the cloned polypeptide of interest can be released from the GST moiety at will.

[0073] In the yeast, Saccharomyces cerevisiae, a number of vectors containing constitutive or inducible promoters such as alpha factor, alcohol oxidase, and PGH may be used. For reviews, see Ausubel et al. (supra) and Grant et al. (1987) Methods Enzymol. 153:516-544.

[0074] In cases where plant expression vectors are used, the expression of sequences encoding polypeptides may be driven by any of a number of promoters. For example, viral promoters such as the 35S and 19S promoters of CaMV may be used alone or in combination with the omega leader sequence from TMV (Takamatsu, N. (1987) EMBO J. 6:307-311. Alternatively, plant promoters such as the small subunit of RUBISCO or heat shock promoters may be used (Coruzzi, G. et al. (1984) EMBO J. 3:1671-1680; Broglie, R. et al. (1984) Science 224:838-843; and Winter, J. et al. (1991) Results Probl. Cell Differ. 17:85-105). These constructs can be introduced into plant cells by direct DNA transformation or pathogen-mediated transfection. Such techniques are described in a number of generally available reviews (see, for example, Hobbs, S. or Murry, L. E. in McGraw Hill Yearbook of Science and Technology (1992) McGraw Hill, New York, N.Y.; pp. 191-196).

[0075] An insect system may also be used to express a polypeptide of interest. For example, in one such system, Autographa californica nuclear polyhedrosis virus (AcNPV) is used as a vector to express foreign genes in Spodoptera frugiperda cells or in Trichoplusia larvae. The sequences encoding the polypeptide may be cloned into a non-essential region of the virus, such as the polyhedrin gene, and placed under control of the polyhedrin promoter. Successful insertion of the polypeptide-encoding sequence will render the polyhedrin gene inactive and produce recombinant virus lacking coat protein. The recombinant viruses may then be used to infect, for example, S. frugiperda cells or Trichoplusia larvae in which the polypeptide of interest may be expressed (Engelhard, E. K. et al. (1994) Proc. Nat. Acad. Sci. 91 :3224-3227).

[0076] In mammalian host cells, a number of viral-based expression systems are generally available. For example, in cases where an adenovirus is used as an expression vector, sequences encoding a polypeptide of interest may be ligated into an adenovirus transcription/translation complex consisting of the late promoter and tripartite leader sequence. Insertion in a non-essential E1 or E3 region of the viral genome may be used to obtain a viable virus which is capable of expressing the polypeptide in infected host cells (Logan, J. and Shenk, T. (1984) Proc. Natl. Acad. Sci. 81:3655-3659). In addition, transcription enhancers, such as the Rous sarcoma virus (RSV) enhancer, may be used to increase expression in mammalian host cells.

[0077] Specific initiation signals may also be used to achieve more efficient translation of sequences encoding a polypeptide of interest. Such signals include the ATG initiation codon and adjacent sequences. In cases where sequences encoding the polypeptide, its initiation codon, and upstream sequences are inserted into the appropriate expression vector, no additional transcriptional or translational control signals may be needed. However, in cases where only coding sequence, or a portion thereof, is inserted, exogenous translational control signals including the ATG initiation codon should be provided. Furthermore, the initiation codon should be in the correct reading frame to ensure translation of the entire insert. Exogenous translational elements and initiation codons may be of various origins, both natural and synthetic. The efficiency of expression may be enhanced by the inclusion of enhancers which are appropriate for the particular cell system which is used, such as those described in the literature (Scharf, D. et al. (1994) Results Probl. Cell Differ. 20:125-162).

[0078] In addition, a host cell strain may be chosen for its ability to modulate the expression of the inserted sequences or to process the expressed protein in the desired fashion. Such modifications of the polypeptide include, but are not limited to, acetylation, carboxylation. glycosylation, phosphorylation, lipidation, and acylation. Post-translational processing which cleaves a “prepro” form of the protein may also be used to facilitate correct insertion, folding and/or function. Different host cells such as CHO, HeLa, MDCK, HEK293, and WI38, which have specific cellular machinery and characteristic mechanisms for such post-translational activities, may be chosen to ensure the correct modification and processing of the foreign protein.

[0079] For long-term, high-yield production of recombinant proteins, stable expression is generally preferred. For example, cell lines which stably express a polynucleotide of interest may be transformed using expression vectors which may contain viral origins of replication and/or endogenous expression elements and a selectable marker gene on the same or on a separate vector. Following the introduction of the vector, cells may be allowed to grow for 1-2 days in an enriched media before they are switched to selective media. The purpose of the selectable marker is to confer resistance to selection, and its presence allows growth and recovery of cells which successfully express the introduced sequences. Resistant clones of stably transformed cells may be proliferated using tissue culture techniques appropriate to the cell type.

[0080] Any number of selection systems may be used to recover transformed cell lines. These include, but are not limited to, the herpes simplex virus thymidine kinase (Wigler, M. et al. (1977) Cell 11:223-32) and adenine phosphoribosyltransferase (Lowy, I. et al. (1990) Cell 22:817-23) genes which can be employed in tk.sup.—or aprt.sup.—cells, respectively. Also, antimetabolite, antibiotic or herbicide resistance can be used as the basis for selection; for example, dhfr which confers resistance to methotrexate (Wigler, M. et al. (1980) Proc. Natl. Acad. Sci. 77:3567-70); npt, which confers resistance to the aminoglycosides, neomycin and G-418 (Colbere-Garapin, F. et al (1981) J. Mol. Biol. 150:1-14); and als or pat, which confer resistance to chlorsulfuron and phosphinotricin acetyltransferase, respectively (Murry, supra). Additional selectable genes have been described, for example, trpB, which allows cells to utilize indole in place of tryptophan, or hisD, which allows cells to utilize histinol in place of histidine (Hartman, S. C. and R. C. Mulligan (1988) Proc. Natl. Acad. Sci. 85:8047-51). Recently, the use of visible markers has gained popularity with such markers as anthocyanins, .beta. glucuronidase and its substrate GUS, and luciferase and its substrate luciferin, being widely used not only to identify transformants, but also to quantify the amount of transient or stable protein expression attributable to a specific vector system (Rhodes, C. A. et al. (1995) Methods Mol. Biol. 55:121-131).

[0081] Although the presence/absence of marker gene expression suggests that the gene of interest is also present, its presence and expression may need to be confirmed. For example, if the sequence encoding a polypeptide is inserted within a marker gene sequence, recombinant cells containing sequences can be identified by the absence of marker gene function. Alternatively, a marker gene can be placed in tandem with a polypeptide-encoding sequence under the control of a single promoter. Expression of the marker gene in response to induction or selection usually indicates expression of the tandem gene as well.

[0082] Alternatively, host cells which contain and express a desired polynucleotide sequence may be identified by a variety of procedures known to those of skill in the art. These procedures include, but are not limited to, DNA-DNA or DNA-RNA hybridizations and protein bioassay or immunoassay techniques which include membrane, solution, or chip based technologies for the detection and/or quantification of nucleic acid or protein.

[0083] A variety of protocols for detecting and measuring the expression of polynucleotide-encoded products, using either polyclonal or monoclonal antibodies specific for the product are known in the art. Examples include enzyme-linked immunosorbent assay (ELISA), radioimmunoassay (RIA), and fluorescence activated cell sorting (FACS). A two-site, monoclonal-based immunoassay utilizing monoclonal antibodies reactive to two non-interfering epitopes on a given polypeptide may be preferred for some applications, but a competitive binding assay may also be employed. These and other assays are described, among other places, in Hampton, R. et al. (1990; Serological Methods, a Laboratory Manual, APS Press, St Paul. Minn.) and Maddox, D. E. et al. (1983; J. Exp. Med. 158:1211-1216).

[0084] A wide variety of labels and conjugation techniques are known by those skilled in the art and may be used in various nucleic acid and amino acid assays. Means for producing labeled hybridization or PCR probes for detecting sequences related to polynucleotides include oligolabeling, nick translation, end-labeling or PCR amplification using a labeled nucleotide. Alternatively, the sequences, or any portions thereof may be cloned into a vector for the production of an mRNA probe. Such vectors are known in the art, are commercially available, and may be used to synthesize RNA probes in vitro by addition of an appropriate RNA polymerase such as T7, T3, or SP6 and labeled nucleotides. These procedures may be conducted using a variety of commercially available kits Amersham Pharmacia Biotech, Promega, and US Biochemical Corp. Suitable reporter molecules or labels, which may be used, include radionuclides, enzymes, fluorescent, chemiluminescent, or chromogenic agents as well as substrates, cofactors, inhibitors, magnetic particles, and the like.

[0085] Host cells transformed with a polynucleotide sequence of interest may be cultured under conditions suitable for the expression and recovery of the protein from cell culture. The protein produced by a recombinant cell may be secreted or contained intracellularly depending on the sequence and/or the vector used. As will be understood by those of skill in the art, expression vectors containing polynucleotides of the invention may be designed to contain signal sequences which direct secretion of the encoded polypeptide through a prokaryotic or eukaryotic cell membrane. Other recombinant constructions may be used to join sequences encoding a polypeptide of interest to nucleotide sequence encoding a polypeptide domain which will facilitate purification of soluble proteins. Such purification facilitating domains include, but are not limited to, metal chelating peptides such as histidine-tryptophan modules that allow purification on immobilized metals, protein A domains that allow purification on immobilized immunoglobulin, and the domain utilized in the FLAGS extension/affinity purification system (Immunex Corp., Seattle, Wash.). The inclusion of cleavable linker sequences such as those specific for Factor XA or enterokinase (Invitrogen. San Diego, Calif.) between the purification domain and the encoded polypeptide may be used to facilitate purification. One such expression vector provides for expression of a fusion protein containing a polypeptide of interest and a nucleic acid encoding 6 histidine residues preceding a thioredoxin or an enterokinase cleavage site. The histidine residues facilitate purification on IMIAC (immobilized metal ion affinity chromatography) as described in Porath, J. et al. (1992, Prot. Exp. Purif. 3: 263-281) while the enterokinase cleavage site provides a means for purifying the desired polypeptide from the fusion protein. A discussion of vectors which contain fusion proteins is provided in Kroll, D. J. et al. (1993; DNA Cell Biol. 12:441-453).

[0086] In addition to recombinant production methods, polypeptides of the invention, and fragments thereof, may be produced by direct peptide synthesis using solid-phase techniques (Merrifield J. (1963) J. Am. Chem. Soc. 85:2149-2154). Protein synthesis may be performed using manual techniques or by automation. Automated synthesis may be achieved, for example, using Applied Biosystems 431A Peptide Synthesizer (Perkin Elmer). Alternatively, various fragments may be chemically synthesized separately and combined using chemical methods to produce the full length molecule.

[0087] Site-specific Mutagenesis

[0088] Site-specific mutagenesis is a technique useful in the preparation of individual peptides, or biologically functional equivalent polypeptides, through specific mutagenesis of the underlying polynucleotides that encode them. The technique, well-known to those of skill in the art, further provides a ready ability to prepare and test sequence variants, for example, incorporating one or more of the foregoing considerations, by introducing one or more nucleotide sequence changes into the DNA. Site-specific mutagenesis allows the production of mutants through the use of specific oligonucleotide sequences which encode the DNA sequence of the desired mutation, as well as a sufficient number of adjacent nucleotides, to provide a primer sequence of sufficient size and sequence complexity to form a stable duplex on both sides of the deletion junction being traversed. Mutations may be employed in a selected polynucleotide sequence to improve, alter, decrease, modify, or otherwise change the properties of the polynucleotide itself, and/or alter the properties, activity, composition, stability, or primary sequence of the encoded polypeptide.

[0089] In certain embodiments of the present invention, the inventors contemplate the mutagenesis of the disclosed polynucleotide sequences to alter one or more properties of the encoded polypeptide, such as the antigenicity of a polypeptide vaccine. The techniques of site-specific mutagenesis are well-known in the art, and are widely used to create variants of both polypeptides and polynucleotides. For example, site-specific mutagenesis is often used to alter a specific portion of a DNA molecule. In such embodiments, a primer comprising typically about 14 to about 25 nucleotides or so in length is employed, with about 5 to about 10 residues on both sides of the junction of the sequence being altered.

[0090] As will be appreciated by those of skill in the art, site-specific mutagenesis techniques have often employed a phage vector that exists in both a single stranded and double stranded form. Typical vectors useful in site-directed mutagenesis include vectors such as the M13 phage. These phage are readily commercially-available and their use is generally well-known to those skilled in the art. Double-stranded plasmids are also routinely employed in site directed mutagenesis that eliminates the step of transferring the gene of interest from a plasmid to a phage.

[0091] In general, site-directed mutagenesis in accordance herewith is performed by first obtaining a single-stranded vector or melting apart of two strands of a double-stranded vector that includes within its sequence a DNA sequence that encodes the desired peptide. An oligonucleotide primer bearing the desired mutated sequence is prepared, generally synthetically. This primer is then annealed with the single-stranded vector, and subjected to DNA polymerizing enzymes such as E. coli polymerase I Klenow fragment, in order to complete the synthesis of the mutation-bearing strand. Thus, a heteroduplex is formed wherein one strand encodes the original non-mutated sequence and the second strand bears the desired mutation. This heteroduplex vector is then used to transform appropriate cells, such as E. coli cells, and clones are selected which include recombinant vectors bearing the mutated sequence arrangement.

[0092] The preparation of sequence variants of the selected peptide-encoding DNA segments using site-directed mutagenesis provides a means of producing potentially useful species and is not meant to be limiting as there are other ways in which sequence variants of peptides and the DNA sequences encoding them may be obtained. For example, recombinant vectors encoding the desired peptide sequence may be treated with mutagenic agents, such as hydroxylamine, to obtain sequence variants. Specific details regarding these methods and protocols are found in the teachings of Maloy et al., 1994; Segal, 1976; Prokop and Bajpai, 1991; Kuby, 1994; and Maniatis et al., 1982, each incorporated herein by reference, for that purpose.

[0093] As used herein, the term “oligonucleotide directed mutagenesis procedure” refers to template-dependent processes and vector-mediated propagation which result in an increase in the concentration of a specific nucleic acid molecule relative to its initial concentration, or in an increase in the concentration of a detectable signal, such as amplification. As used herein, the term “oligonucleotide directed mutagenesis procedure” is intended to refer to a process that involves the template-dependent extension of a primer molecule. The term template dependent process refers to nucleic acid synthesis of an RNA or a DNA molecule wherein the sequence of the newly synthesized strand of nucleic acid is dictated by the well-known rules of complementary base pairing (see, for example, Watson, 1987). Typically, vector mediated methodologies involve the introduction of the nucleic acid fragment into a DNA or RNA vector, the clonal amplification of the vector, and the recovery of the amplified nucleic acid fragment. Examples of such methodologies are provided by U.S. Pat. No. 4,237,224, specifically incorporated herein by reference in its entirety.

[0094] Polynucleotide Amplification Techniques

[0095] A number of template dependent processes are available to amplify the target sequences of interest present in a sample. One of the best known amplification methods is the polymerase chain reaction (PCR™) which is described in detail in U.S. Pat. Nos. 4,683,195, 4,683,202 and 4,800,159, each of which is incorporated herein by reference in its entirety. Briefly, in PCR™, two primer sequences are prepared which are complementary to regions on opposite complementary strands of the target sequence. An excess of deoxynucleoside triphosphates is added to a reaction mixture along with a DNA polymerase (e.g., Taq polymerase). If the target sequence is present in a sample, the primers will bind to the target and the polymerase will cause the primers to be extended along the target sequence by adding on nucleotides. By raising and lowering the temperature of the reaction mixture, the extended primers will dissociate from the target to form reaction products, excess primers will bind to the target and to the reaction product and the process is repeated. Preferably reverse transcription and PCR™ amplification procedure may be performed in order to quantify the amount of mRNA amplified. Polymerase chain reaction methodologies are well known in the art.

[0096] Another method for amplification is the ligase chain reaction (referred to as LCR), disclosed in Eur. Pat. Appl. Publ. No. 320,308 (specifically incorporated herein by reference in its entirety). In LCR, two complementary probe pairs are prepared, and in the presence of the target sequence, each pair will bind to opposite complementary strands of the target such that they abut. In the presence of a ligase, the two probe pairs will link to form a single unit. By temperature cycling, as in PCR™, bound ligated units dissociate from the target and then serve as “target sequences” for ligation of excess probe pairs. U.S. Pat. No. 4,883,750, incorporated herein by reference in its entirety, describes an alternative method of amplification similar to LCR for binding probe pairs to a target sequence.

[0097] Qbeta Replicase, described in PCT Intl. Pat. Appl. Publ. No. PCT/US87/00880, incorporated herein by reference in its entirety, may also be used as still another amplification method in the present invention. In this method, a replicative sequence of RNA that has a region complementary to that of a target is added to a sample in the presence of an RNA polymerase. The polymerase will copy the replicative sequence that can then be detected.

[0098] An isothermal amplification method, in which restriction endonucleases and ligases are used to achieve the amplification of target molecules that contain nucleotide 5′-[α-thio]triphosphates in one strand of a restriction site (Walker et al., 1992, incorporated herein by reference in its entirety), may also be useful in the amplification of nucleic acids in the present invention.

[0099] Strand Displacement Amplification (SDA) is another method of carrying out isothermal amplification of nucleic acids which involves multiple rounds of strand displacement and synthesis, i.e. nick translation. A similar method, called Repair Chain Reaction (RCR) is another method of amplification which may be useful in the present invention and is involves annealing several probes throughout a region targeted for amplification, followed by a repair reaction in which only two of the four bases are present. The other two bases can be added as biotinylated derivatives for easy detection. A similar approach is used in SDA.

[0100] Sequences can also be detected using a cyclic probe reaction (CPR). In CPR, a probe having a 3′ and 5′ sequences of non-target DNA and an internal or “middle” sequence of the target protein specific RNA is hybridized to DNA which is present in a sample. Upon hybridization, the reaction is treated with RNaseH, and the products of the probe are identified as distinctive products by generating a signal that is released after digestion. The original template is annealed to another cycling probe and the reaction is repeated. Thus, CPR involves amplifying a signal generated by hybridization of a probe to a target gene specific expressed nucleic acid.

[0101] Still other amplification methods described in Great Britain Pat. Appl. No. 2 202 328, and in PCT Intl. Pat. Appl. Publ. No. PCT/US89/01025, each of which is incorporated herein by reference in its entirety, may be used in accordance with the present invention. In the former application, “modified” primers are used in a PCR-like, template and enzyme dependent synthesis. The primers may be modified by labeling with a capture moiety (e.g., biotin) and/or a detector moiety (e.g., enzyme). In the latter application, an excess of labeled probes is added to a sample. In the presence of the target sequence, the probe binds and is cleaved catalytically. After cleavage, the target sequence is released intact to be bound by excess probe. Cleavage of the labeled probe signals the presence of the target sequence.

[0102] Other nucleic acid amplification procedures include transcription-based amplification systems (TAS) (Kwoh et al., 1989; PCT Intl. Pat. Appl. Publ. No. WO 88/10315, incorporated herein by reference in its entirety), including nucleic acid sequence based amplification (NASBA) and 3SR. In NASBA, the nucleic acids can be prepared for amplification by standard phenol/chloroform extraction, heat denaturation of a sample, treatment with lysis buffer and minispin columns for isolation of DNA and RNA or guanidinium chloride extraction of RNA. These amplification techniques involve annealing a primer that has sequences specific to the target sequence. Following polymerization, DNA/RNA hybrids are digested with RNase H while double stranded DNA molecules are heat-denatured again. In either case the single stranded DNA is made fully double stranded by addition of second target-specific primer, followed by polymerization. The double stranded DNA molecules are then multiply transcribed by a polymerase such as T7 or SP6. In an isothermal cyclic reaction, the RNAs are reverse transcribed into DNA, and transcribed once again with a polymerase such as T7 or SP6. The resulting products, whether truncated or complete, indicate target-specific sequences.

[0103] Eur. Pat. Appl. Publ. No. 329,822, incorporated herein by reference in its entirety, disclose a nucleic acid amplification process involving cyclically synthesizing single-stranded RNA (“ssRNA”), ssDNA, and double-stranded DNA (dsDNA), which may be used in accordance with the present invention. The ssRNA is a first template for a first primer oligonucleotide, which is elongated by reverse transcriptase (RNA-dependent DNA polymerase). The RNA is then removed from resulting DNA:RNA duplex by the action of ribonuclease H (RNase H, an RNase specific for RNA in a duplex with either DNA or RNA). The resultant ssDNA is a second template for a second primer, which also includes the sequences of an RNA polymerase promoter (exemplified by T7 RNA polymerase) 5′ to its homology to its template. This primer is then extended by DNA polymerase (exemplified by the large “Klenow” fragment of E. coli DNA polymerase 1), resulting as a double-stranded DNA (“dsDNA”) molecule, having a sequence identical to that of the original RNA between the primers and having additionally, at one end, a promoter sequence. This promoter sequence can be used by the appropriate RNA polymerase to make many RNA copies of the DNA. These copies can then re-enter the cycle leading to very swift amplification. With proper choice of enzymes, this amplification can be done isothermally without addition of enzymes at each cycle. Because of the cyclical nature of this process, the starting sequence can be chosen to be in the form of either DNA or RNA.

[0104] PCT Intl. Pat. Appl. Publ. No. WO 89/06700, incorporated herein by reference in its entirety, disclose a nucleic acid sequence amplification scheme based on the hybridization of a promoter/primer sequence to a target single-stranded DNA (“ssDNA”) followed by transcription of many RNA copies of the sequence. This scheme is not cyclic; i.e. new templates are not produced from the resultant RNA transcripts. Other amplification methods include “RACE” (Frohman, 1990), and “one-sided PCR” (Ohara, 1989) which are well-known to those of skill in the art.

[0105] Methods based on ligation of two (or more) oligonucleotides in the presence of nucleic acid having the sequence of the resulting “di-oligonucleotide”, thereby amplifying the di-oligonucleotide (Wu and Dean, 1996, incorporated herein by reference in its entirety), may also be used in the amplification of DNA sequences of the present invention.

[0106] Biological Functional Equivalents

[0107] Modification and changes may be made in the structure of the polynucleotides and polypeptides of the present invention and still obtain a functional molecule that encodes a polypeptide with desirable characteristics. As mentioned above, it is often desirable to introduce one or more mutations into a specific polynucleotide sequence. In certain circumstances, the resulting encoded polypeptide sequence is altered by this mutation, or in other cases, the sequence of the polypeptide is unchanged by one or more mutations in the encoding polynucleotide.

[0108] When it is desirable to alter the amino acid sequence of a polypeptide to create an equivalent, or even an improved, second-generation molecule, the amino acid changes may be achieved by changing one or more of the codons of the encoding DNA sequence, according to Table 1.

[0109] For example, certain amino acids may be substituted for other amino acids in a protein structure without appreciable loss of interactive binding capacity with structures such as, for example, antigen-binding regions of antibodies or binding sites on substrate molecules. Since it is the interactive capacity and nature of a protein that defines that protein's biological functional activity, certain amino acid sequence substitutions can be made in a protein sequence, and, of course, its underlying DNA coding sequence, and nevertheless obtain a protein with like properties. It is thus contemplated by the inventors that various changes may be made in the peptide sequences of the disclosed compositions, or corresponding DNA sequences which encode said peptides without appreciable loss of their biological utility or activity.

TABLE 1

| Amino Acids | | | Codons | | | | | |
|---|---|---|---|---|---|---|---|---|
| Alanine | Ala | A | GCA | GCC | GCG | GCU | | |
| Cysteine | Cys | C | UGC | UGU | | | | |
| Aspartic acid | Asp | D | GAC | GAU | | | | |
| Glutamic acid | Glu | E | GAA | GAG | | | | |
| Phenylalanine | Phe | F | UUC | UUU | | | | |
| Glycine | Gly | G | GGA | GGC | GGG | GGU | | |
| Histidine | His | H | CAC | CAU | | | | |
| Isoleucine | Ile | I | AUA | AUC | AUU | | | |
| Lysine | Lys | K | AAA | AAG | | | | |
| Leucine | Leu | L | UUA | UUG | CUA | CUC | CUG | CUU |
| Methionine | Met | M | AUG | | | | | |
| Asparagine | Asn | N | AAC | AAU | | | | |
| Proline | Pro | P | CCA | CCC | CCG | CCU | | |
| Glutamine | Gln | Q | CAA | CAG | | | | |
| Arginine | Arg | R | AGA | AGG | CGA | CGC | CGG | CGU |
| Serine | Ser | S | AGC | AGU | UCA | UCC | UCG | UCU |
| Threonine | Thr | T | ACA | ACC | ACG | ACU | | |
| Valine | Val | V | GUA | GUC | GUG | GUU | | |
| Tryptophan | Trp | W | UGG | | | | | |
| Tyrosine | Tyr | Y | UAC | UAU | | | | |

[0110] In making such changes, the hydropathic index of amino acids may be considered. The importance of the hydropathic amino acid index in conferring interactive biologic function on a protein is generally understood in the art (Kyte and Doolittle, 1982, incorporate herein by reference). It is accepted that the relative hydropathic character of the amino acid contributes to the secondary structure of the resultant protein, which in turn defines the interaction of the protein with other molecules, for example, enzymes, substrates, receptors, DNA, antibodies, antigens, and the like. Each amino acid has been assigned a hydropathic index on the basis of its hydrophobicity and charge characteristics (Kyte and Doolittle, 1982). These values are: isoleucine (+4.5); valine (+4.2); leucine (+3.8); phenylalanine (+2.8); cysteine/cystine (+2.5); methionine (+1.9); alanine (+1.8); glycine (−0.4); threonine (−0.7); serine (−0.8); tryptophan (−0.9); tyrosine (−1.3); proline (−1.6); histidine (−3.2); glutamate (−3.5); glutamine (−3.5); aspartate (−3.5); asparagine (−3.5); lysine (−3.9); and arginine (−4.5).

[0111] It is known in the art that certain amino acids may be substituted by other amino acids having a similar hydropathic index or score and still result in a protein with similar biological activity, i.e. still obtain a biological functionally equivalent protein. In making such changes, the substitution of amino acids whose hydropathic indices are within ±2 is preferred, those within ±1 are particularly preferred, and those within ±0.5 are even more particularly preferred. It is also understood in the art that the substitution of like amino acids can be made effectively on the basis of hydrophilicity. U.S. Pat. No. 4,554,101 (specifically incorporated herein by reference in its entirety), states that the greatest local average hydrophilicity of a protein, as governed by the hydrophilicity of its adjacent amino acids, correlates with a biological property of the protein.

[0112] As detailed in U.S. Pat. No. 4,554,101, the following hydrophilicity values have been assigned to amino acid residues: arginine (+3.0); lysine (+3.0); aspartate (+3.0±1); glutamate (+3.0±1); serine (+0.3); asparagine (+0.2); glutamine (+0.2); glycine (0); threonine (−0.4); proline (−0.5±1); alanine (−0.5); histidine (−0.5); cysteine (−1.0); methionine (−1.3); valine (−1.5); leucine (−1.8); isoleucine (−1.8); tyrosine (−2.3); phenylalanine (−2.5); tryptophan (−3.4). It is understood that an amino acid can be substituted for another having a similar hydrophilicity value and still obtain a biologically equivalent, and in particular, an immunologically equivalent protein. In such changes, the substitution of amino acids whose hydrophilicity values are within ±2 is preferred, those within ±1 are particularly preferred, and those within ±0.5 are even more particularly preferred.

[0113] As outlined above, amino acid substitutions are generally therefore based on the relative similarity of the amino acid side-chain substituents, for example, their hydrophobicity, hydrophilicity, charge, size, and the like. Exemplary substitutions that take various of the foregoing characteristics into consideration are well known to those of skill in the art and include: arginine and lysine; glutamate and aspartate; serine and threonine; glutamine and asparagine; and valine, leucine and isoleucine.

[0114] In addition, any polynucleotide may be further modified to increase stability in vivo. Possible modifications include, but are not limited to, the addition of flanking sequences at the 5′ and/or 3′ ends; the use of phosphorothioate or 2′ O-methyl rather than phosphodiesterase linkages in the backbone; and/or the inclusion of nontraditional bases such as inosine, queosine and wybutosine, as well as acetyl- methyl-, thio- and other modified forms of adenine, cytidine, guanine, thymine and uridine.

[0115] In vivo Polynucleotide Delivery Techniques

[0116] In additional embodiments, genetic constructs comprising one or more of the polynucleotides of the invention are introduced into cells in vivo. This may be achieved using any of a variety or well known approaches, several of which are outlined below for the purpose of illustration.

[0117] 1. Adenovirus

[0118] One of the preferred methods for in vivo delivery of one or more nucleic acid sequences involves the use of an adenovirus expression vector. “Adenovirus expression vector” is meant to include those constructs containing adenovirus sequences sufficient to (a) support packaging of the construct and (b) to express a polynucleotide that has been cloned therein in a sense or antisense orientation. Of course, in the context of an antisense construct, expression does not require that the gene product be synthesized.

[0119] The expression vector comprises a genetically engineered form of an adenovirus. Knowledge of the genetic organization of adenovirus, a 36 kb, linear, double-stranded DNA virus, allows substitution of large pieces of adenoviral DNA with foreign sequences up to 7 kb (Grunhaus and Horwitz, 1992). In contrast to retrovirus, the adenoviral infection of host cells does not result in chromosomal integration because adenoviral DNA can replicate in an episomal manner without potential genotoxicity. Also, adenoviruses are structurally stable, and no genome rearrangement has been detected after extensive amplification. Adenovirus can infect virtually all epithelial cells regardless of their cell cycle stage. So far, adenoviral infection appears to be linked only to mild disease such as acute respiratory disease in humans.

[0120] Adenovirus is particularly suitable for use as a gene transfer vector because of its mid-sized genome, ease of manipulation, high titer, wide target-cell range and high infectivity. Both ends of the viral genome contain 100-200 base pair inverted repeats (ITRs), which are cis elements necessary for viral DNA replication and packaging. The early (E) and late (L) regions of the genome contain different transcription units that are divided by the onset of viral DNA replication. The E1 region (E1A and E1B) encodes proteins responsible for the regulation of transcription of the viral genome and a few cellular genes. The expression of the E2 region (E2A and E2B) results in the synthesis of the proteins for viral DNA replication. These proteins are involved in DNA replication, late gene expression and host cell shut-off (Renan, 1990). The products of the late genes, including the majority of the viral capsid proteins, are expressed only after significant processing of a single primary transcript issued by the major late promoter (MLP). The MLP, (located at 16.8 m.u.) is particularly efficient during the late phase of infection, and all the mRNA's issued from this promoter possess a 5′-tripartite leader (TPL) sequence which makes them preferred mRNA's for translation.

[0121] In a current system, recombinant adenovirus is generated from homologous recombination between shuttle vector and provirus vector. Due to the possible recombination between two proviral vectors, wild-type adenovirus may be generated from this process. Therefore, it is critical to isolate a single clone of virus from an individual plaque and examine its genomic structure.

[0122] Generation and propagation of the current adenovirus vectors, which are replication deficient, depend on a unique helper cell line, designated 293, which was transformed from human embryonic kidney cells by Ad5 DNA fragments and constitutively expresses E1 proteins (Graham et al., 1977). Since the E3 region is dispensable from the adenovirus genome (Jones and Shenk, 1978), the current adenovirus vectors, with the help of 293 cells, carry foreign DNA in either the E1, the D3 or both regions (Graham and Prevec, 1991). In nature, adenovirus can package approximately 105% of the wild-type genome (Ghosh-Choudhury et al., 1987), providing capacity for about 2 extra kB of DNA. Combined with the approximately 5.5 kB of DNA that is replaceable in the E1 and E3 regions, the maximum capacity of the current adenovirus vector is under 7.5 kB, or about 15% of the total length of the vector. More than 80% of the adenovirus viral genome remains in the vector backbone and is the source of vector-borne cytotoxicity. Also, the replication deficiency of the E1-deleted virus is incomplete. For example, leakage of viral gene expression has been observed with the currently available vectors at high multiplicities of infection (MOI) (Mulligan, 1993).

[0123] Helper cell lines may be derived from human cells such as human embryonic kidney cells, muscle cells, hematopoietic cells or other human embryonic mesenchymal or epithelial cells. Alternatively, the helper cells may be derived from the cells of other mammalian species that are permissive for human adenovirus. Such cells include, e.g., Vero cells or other monkey embryonic mesenchymal or epithelial cells. As stated above, the currently preferred helper cell line is 293.

[0124] Recently, Racher et al. (1995) disclosed improved methods for culturing 293 cells and propagating adenovirus. In one format, natural cell aggregates are grown by inoculating individual cells into 1 liter siliconized spinner flasks (Techne, Cambridge, UK) containing 100-200 ml of medium. Following stirring at 40 rpm, the cell viability is estimated with trypan blue. In another format, Fibra-Cel microcarriers (Bibby Sterlin, Stone, UK) (5 g/l) is employed as follows. A cell inoculum, resuspended in 5 ml of medium, is added to the carrier (50 ml) in a 250 ml Erlenmeyer flask and left stationary, with occasional agitation, for 1 to 4 h. The medium is then replaced with 50 ml of fresh medium and shaking initiated. For virus production, cells are allowed to grow to about 80% confluence, after which time the medium is replaced (to 25% of the final volume) and adenovirus added at an MOI of 0.05. Cultures are left stationary overnight, following which the volume is increased to 100% and shaking commenced for another 72 h.

[0125] Other than the requirement that the adenovirus vector be replication defective, or at least conditionally defective, the nature of the adenovirus vector is not believed to be crucial to the successful practice of the invention. The adenovirus may be of any of the 42 different known serotypes or subgroups A-F. Adenovirus type 5 of subgroup C is the preferred starting material in order to obtain the conditional replication-defective adenovirus vector for use in the present invention. This is because Adenovirus type 5 is a human adenovirus about which a great deal of biochemical and genetic information is known, and it has historically been used for most constructions employing adenovirus as a vector.

[0126] As stated above, the typical vector according to the present invention is replication defective and will not have an adenovirus E1 region. Thus, it will be most convenient to introduce the polynucleotide encoding the gene of interest at the position from which the E1-coding sequences have been removed. However, the position of insertion of the construct within the adenovirus sequences is not critical to the invention. The polynucleotide encoding the gene of interest may also be inserted in lieu of the deleted E3 region in E3 replacement vectors as described by Karlsson et al. (1986) or in the E4 region where a helper cell line or helper virus complements the E4 defect.

[0127] Adenovirus is easy to grow and manipulate and exhibits broad host range in vitro and in vivo. This group of viruses can be obtained in high titers, e.g., 10⁹-10¹¹ plaque-forming units per ml, and they are highly infective. The life cycle of adenovirus does not require integration into the host cell genome. The foreign genes delivered by adenovirus vectors are episomal and, therefore, have low genotoxicity to host cells. No side effects have been reported in studies of vaccination with wild-type adenovirus (Couch et al., 1963; Top et al., 1971), demonstrating their safety and therapeutic potential as in vivo gene transfer vectors.

[0128] Adenovirus vectors have been used in eukaryotic gene expression (Levrero et al, 1991; Gomez-Foix et al., 1992) and vaccine development (Grunhaus and Horwitz, 1992; Graham and Prevec, 1992). Recently, animal studies suggested that recombinant adenovirus could be used for gene therapy (Stratford-Perricaudet and Perricaudet, 1991; Stratford-Perricaudet et al., 1990; Rich et al., 1993). Studies in administering recombinant adenovirus to different tissues include trachea instillation (Rosenfeld et al., 1991; Rosenfeld et al, 1992), muscle injection (Ragot et al., 1993), peripheral intravenous injections (Herz and Gerard, 1993) and stereotactic inoculation into the brain (Le Gal La Salle et al., 1993).

[0129] 2. Retroviruses

[0130] The retroviruses are a group of single-stranded RNA viruses characterized by an ability to convert their RNA to double-stranded DNA in infected cells by a process of reverse-transcription (Coffin, 1990). The resulting DNA then stably integrates into cellular chromosomes as a provirus and directs synthesis of viral proteins. The integration results in the retention of the viral gene sequences in the recipient cell and its descendants. The retroviral genome contains three genes, gag, pol, and env that code for capsid proteins, polymerase enzyme, and envelope components, respectively. A sequence found upstream from the gag gene contains a signal for packaging of the genome into virions. Two long terminal repeat (LTR) sequences are present at the 5′ and 3′ ends of the viral genome. These contain strong promoter and enhancer sequences and are also required for integration in the host cell genome (Coffin, 1990).

[0131] In order to construct a retroviral vector, a nucleic acid encoding one or more oligonucleotide or polynucleotide sequences of interest is inserted into the viral genome in the place of certain viral sequences to produce a virus that is replication-defective. In order to produce virions, a packaging cell line containing the gag, pol, and env genes but without the LTR and packaging components is constructed (Mann et al., 1983). When a recombinant plasmid containing a cDNA, together with the retroviral LTR and packaging sequences is introduced into this cell line (by calcium phosphate precipitation for example), the packaging sequence allows the RNA transcript of the recombinant plasmid to be packaged into viral particles, which are then secreted into the culture media (Nicolas and Rubenstein, 1988; Temin, 1986; Mann et al., 1983). The media containing the recombinant retroviruses is then collected, optionally concentrated, and used for gene transfer. Retroviral vectors are able to infect a broad variety of cell types. However, integration and stable expression require the division of host cells (Paskind et al., 1975).

[0132] A novel approach designed to allow specific targeting of retrovirus vectors was recently developed based on the chemical modification of a retrovirus by the chemical addition of lactose residues to the viral envelope. This modification could permit the specific infection of hepatocytes via sialoglycoprotein receptors.

[0133] A different approach to targeting of recombinant retroviruses was designed in which biotinylated antibodies against a retroviral envelope protein and against a specific cell receptor were used. The antibodies were coupled via the biotin components by using streptavidin (Roux et al., 1989). Using antibodies against major histocompatibility complex class I and class II antigens, they demonstrated the infection of a variety of human cells that bore those surface antigens with an ecotropic virus in vitro (Roux et al., 1989).

[0134] There are certain limitations to the use of retrovirus vectors in all aspects of the present invention. For example, retrovirus vectors usually integrate into random sites in the cell genome. This can lead to insertional mutagenesis through the interruption of host genes or through the insertion of viral regulatory sequences that can interfere with the function of flanking genes (Varmus et al., 1981). Another concern with the use of defective retrovirus vectors is the potential appearance of wild-type replication-competent virus in the packaging cells. This can result from recombination events in which the intact sequence from the recombinant virus inserts upstream from the gag, pol, and env sequence integrated in the host cell genome. However, new packaging cell lines are now available that should greatly decrease the likelihood of recombination (Markowitz et al., 1988; Hersdorffer et al., 1990).

[0135] 3. Adeno-associated Viruses

[0136] AAV (Ridgeway, 1988; Hermonat and Muzycska, 1984) is a parovirus, discovered as a contamination of adenoviral stocks. It is a ubiquitous virus (antibodies are present in 85% of the US human population) that has not been linked to any disease. It is also classified as a dependovirus, because its replications is dependent on the presence of a helper virus, such as adenovirus. Five serotypes have been isolated, of which AAV-2 is the best characterized. AAV has a single-stranded linear DNA that is encapsidated into capsid proteins VP1, VP2 and VP3 to form an icosahedral virion of 20 to 24 nm in diameter (Muzyczka and McLaughlin, 1988).

[0137] The AAV DNA is approximately 4.7 kilobases long. It contains two open reading frames and is flanked by two ITRs (FIG. 2). There are two major genes in the AAV genome: rep and cap. The rep gene codes for proteins responsible for viral replications, whereas cap codes for capsid protein VP1-3. Each ITR forms a T-shaped hairpin structure. These terminal repeats are the only essential cis components of the AAV for chromosomal integration. Therefore, the AAV can be used as a vector with all viral coding sequences removed and replaced by the cassette of genes for delivery. Three viral promoters have been identified and named p5, p19, and p40, according to their map position. Transcription from p5 and p19 results in production of rep proteins, and transcription from p40 produces the capsid proteins (Hermonat and Muzyczka, 1984).

[0138] There are several factors that prompted researchers to study the possibility of using rAAV as an expression vector One is that the requirements for delivering a gene to integrate into the host chromosome are surprisingly few. It is necessary to have the 145-bp ITRs, which are only 6% of the AAV genome. This leaves room in the vector to assemble a 4.5-kb DNA insertion. While this carrying capacity may prevent the AAV from delivering large genes, it is amply suited for delivering the antisense constructs of the present invention.

[0139] AAV is also a good choice of delivery vehicles due to its safety. There is a relatively complicated rescue mechanism: not only wild type adenovirus but also AAV genes are required to mobilize rAAV. Likewise, AAV is not pathogenic and not associated with any disease. The removal of viral coding sequences minimizes immune reactions to viral gene expression, and therefore, rAAV does not evoke an imflammatory response.

[0140] 4. Other Viral Vectors as Expression Constructs

[0141] Other viral vectors may be employed as expression constructs in the present invention for the delivery of oligonucleotide or polynucleotide sequences to a host cell. Vectors derived from viruses such as vaccinia virus (Ridgeway, 1988; Coupar et al., 1988), lentiviruses, polio viruses and herpesviruses may be employed. They offer several attractive features for various mammalian cells (Friedmann, 1989; Ridgeway, 1988; Coupar et al., 1988; Horwich et al., 1990).

[0142] With the recent recognition of defective hepatitis B viruses, new insight was gained into the structure-function relationship of different viral sequences. In vitro studies showed that the virus could retain the ability for helper-dependent packaging and reverse transcription despite the deletion of up to 80% of its genome (Horwich et al., 1990). This suggested that large portions of the genome could be replaced with foreign genetic material. The hepatotropism and persistence (integration) were particularly attractive properties for liver-directed gene transfer. Chang et al. (1991) introduced the chloramphenicol acetyltransferase (CAT) gene into duck hepatitis B virus genome in the place of the polymerase, surface, and pre-surface coding sequences. It was cotransfected with wild-type virus into an avian hepatoma cell line. Culture media containing high titers of the recombinant virus were used to infect primary duckling hepatocytes. Stable CAT gene expression was detected for at least 24 days after transfection (Chang et al., 1991).

[0143] 5. Non-viral Vectors

[0144] In order to effect expression of the oligonucleotide or polynucleotide sequences of the present invention, the expression construct must be delivered into a cell. This delivery may be accomplished in vitro, as in laboratory procedures for transforming cells lines, or in vivo or ex vivo, as in the treatment of certain disease states. As described above, one preferred mechanism for delivery is via viral infection where the expression construct is encapsidated in an infectious viral particle.

[0145] Once the expression construct has been delivered into the cell the nucleic acid encoding the desired oligonucleotide or polynucleotide sequences may be positioned and expressed at different sites. In certain embodiments, the nucleic acid encoding the construct may be stably integrated into the genome of the cell. This integration may be in the specific location and orientation via homologous recombination (gene replacement) or it may be integrated in a random, non-specific location (gene augmentation). In yet further embodiments, the nucleic acid may be stably maintained in the cell as a separate, episomal segment of DNA. Such nucleic acid segments or “episomes” encode sequences sufficient to permit maintenance and replication independent of or in synchronization with the host cell cycle. How the expression construct is delivered to a cell and where in the cell the nucleic acid remains is dependent on the type of expression construct employed.

[0146] In certain embodiments of the invention, the expression construct comprising one or more oligonucleotide or polynucleotide sequences may simply consist of naked recombinant DNA or plasmids. Transfer of the construct may be performed by any of the methods mentioned above which physically or chemically permeabilize the cell membrane. This is particularly applicable for transfer in vitro but it may be applied to in vivo use as well. Dubensky et al. (1984) successfully injected polyomavirus DNA in the form of calcium phosphate precipitates into liver and spleen of adult and newborn mice demonstrating active viral replication and acute infection. Benvenisty and Reshef (1986) also demonstrated that direct intraperitoneal injection of calcium phosphate-precipitated plasmids results in expression of the transfected genes. It is envisioned that DNA encoding a gene of interest may also be transferred in a similar manner in vivo and express the gene product.

[0147] Another embodiment of the invention for transferring a naked DNA expression construct into cells may involve particle bombardment. This method depends on the ability to accelerate DNA-coated microprojectiles to a high velocity allowing them to pierce cell membranes and enter cells without killing them (Klein et al., 1987). Several devices for accelerating small particles have been developed. One such device relies on a high voltage discharge to generate an electrical current, which in turn provides the motive force (Yang et al., 1990). The microprojectiles used have consisted of biologically inert substances such as tungsten or gold beads.

[0148] Selected organs including the liver, skin, and muscle tissue of rats and mice have been bombarded in vivo (Yang et al., 1990; Zelenin et al., 1991). This may require surgical exposure of the tissue or cells, to eliminate any intervening tissue between the gun and the target organ, i.e. ex vivo treatment. Again, DNA encoding a particular gene may be delivered via this method and still be incorporated by the present invention.

[0149] Antisense Oligonucleotides

[0150] The end result of the flow of genetic information is the synthesis of protein. DNA is transcribed by polymerases into messenger RNA and translated on the ribosome to yield a folded, functional protein. Thus, even from this simplistic description of an extremely complex set of reactions, it is obvious that there are several steps along the route where protein synthesis can be inhibited. The native DNA segment coding for a polypeptide described herein, as all such mammalian DNA strands, has two strands: a sense strand and an antisense strand held together by hydrogen bonding. The messenger RNA coding for polypeptide has the same nucleotide sequence as the sense DNA strand except that the DNA thymidine is replaced by uridine. Thus, synthetic antisense nucleotide sequences will bind to a mRNA and inhibit expression of the protein encoded by that mRNA.

[0151] Thus, the targeting of antisense oligonucleotides to bind mRNA is one mechanism to shut down protein synthesis, and, consequently, represents a powerful and targeted therapeutic approach. For example, the synthesis of polygalactauronase and the muscarine type 2 acetylcholine receptor are inhibited by antisense oligonucleotides directed to their respective mRNA sequences (U.S. Pat. No. 5,739,119 and U.S. Pat. No. 5,759,829, each specifically incorporated herein by reference in its entirety). Further, examples of antisense inhibition have been demonstrated with the nuclear protein cyclin, the multiple drug resistance gene (MDG1), ICAM-1, E-selectin, STK-1, striatal GABA_{A} receptor and human EGF (Jaskulski et al., 1988; Vasanthakumar and Ahmed, 1989; Peris et al., 1998; U.S. Pat. No. 5,801,154; U.S. Pat. No. 5,789,573; U.S. Pat. No. 5,718,709 and U.S. Pat. No. 5,610,288, each specifically incorporated herein by reference in its entirety). Antisense constructs have also been described that inhibit and can be used to treat a variety of abnormal cellular proliferations, e.g. cancer (U.S. Pat. No. 5,747,470; U.S. Pat. No. 5,591,317 and U.S. Pat. No. 5,783,683, each specifically incorporated herein by reference in its entirety).

[0152] Therefore, in exemplary embodiments, the invention provides oligonucleotide sequences that comprise all, or a portion of, any sequence that is capable of specifically binding to polynucleotide sequence described herein, or a complement thereof. In one embodiment, the antisense oligonucleotides comprise DNA or derivatives thereof. In another embodiment, the oligonucleotides comprise RNA or derivatives thereof. In a third embodiment, the oligonucleotides are modified DNAs comprising a phosphorothioated modified backbone. In a fourth embodiment, the oligonucleotide sequences comprise peptide nucleic acids or derivatives thereof. In each case, preferred compositions comprise a sequence region that is complementary, and more preferably substantially-complementary, and even more preferably, completely complementary to one or more portions of polynucleotides disclosed herein.

[0153] Selection of antisense compositions specific for a given gene sequence is based upon analysis of the chosen target sequence (i.e. in these illustrative examples the rat and human sequences) and determination of secondary structure, Tm, binding energy, relative stability, and antisense compositions were selected based upon their relative inability to form dimers, hairpins, or other secondary structures that would reduce or prohibit specific binding to the target mRNA in a host cell.

[0154] Highly preferred target regions of the mRNA, are those which are at or near the AUG translation initiation codon, and those sequences which were substantially complementary to 5′ regions of the mRNA. These secondary structure analyses and target site selection considerations were performed using v.4 of the OLIGO primer analysis software (Rychlik, 1997) and the BLASTN 2.0.5 algorithm software (Altschul et al., 1997).

[0155] The recent development of an antisense delivery method based on the use of a short peptide vector, termed MPG (27 residues), is also contemplated. The MPG peptide contains a hydrophobic domain derived from the fusion sequence of HIV gp41 and a hydrophilic domain from the nuclear localization sequence of SV40 T-antigen (Morris et al., 1997). It was demonstrated in that several molecules of the MPG peptides coat the antisense oligonucleotides and can be delivered into cultured mammalian cells in less than 1 hour with relatively high efficiency (90%). Further, the interaction with MPG strongly increases both the stability of the oligonucleotide to nuclease and the ability to cross the plasma membrane (Morris et al., 1997).

[0156] Ribozymes

[0157] The present invention also provides, within alternate embodiments, ribozyme inhibitors of a variety of ovarian tumors. A ribozyme is an RNA molecule that specifically cleaves RNA substrates, such as mRNA, resulting in specific inhibition or interference with cellular gene expression. As used herein, the term “ribozymes” includes RNA molecules that contain antisense sequences for specific recognition, and an RNA-cleaving endonuclease activity. (Kim and Cech, 1987; Gerlach et al., 1987; Forster and Symons, 1987). The catalytic strand cleaves a specific site in a target RNA at greater than stoichiometric concentration. For example, a large number of ribozymes accelerate phosphoester transfer reactions with a high degree of specificity, often cleaving only one of several phosphoesters in an oligonucleotide substrate (Cech et al., 1981; Michel and Westhof, 1990; Reinhold-Hurek and Shub, 1992). This specificity has been attributed to the requirement that the substrate bind via specific base-pairing interactions to the internal guide sequence (“IGS”) of the ribozyme prior to chemical reaction.

[0158] Ribozyme catalysis has primarily been observed as part of sequence-specific cleavage/ligation reactions involving nucleic acids (Joyce, 1989; Cech et al., 1981). For example, U.S. Pat. No. 5,354,855 (specifically incorporated herein by reference) reports that certain ribozymes can act as endonucleases with a sequence specificity greater than that of known ribonucleases and approaching that of the DNA restriction enzymes. Thus, sequence-specific ribozyme-mediated inhibition of gene expression may be particularly suited to therapeutic applications (Scanlon et al., 1991; Sarver et al., 1990). Recently, it was reported that ribozymes elicited genetic changes in some cells lines to which they were applied; the altered genes included the oncogenes H-ras, c-fos and genes of HIV. Most of this work involved the modification of a target mRNA, based on a specific mutant codon that is cleaved by a specific ribozyme.

[0159] Six basic varieties of naturally-occurring enzymatic RNAs are known presently. Each can catalyze the hydrolysis of RNA phosphodiester bonds in trans (and thus can cleave other RNA molecules) under physiological conditions. In general, enzymatic nucleic acids act by first binding to a target RNA. Such binding occurs through the target binding portion of a enzymatic nucleic acid which is held in close proximity to an enzymatic portion of the molecule that acts to cleave the target RNA. Thus, the enzymatic nucleic acid first recognizes and then binds a target RNA through complementary base-pairing, and once bound to the correct site, acts enzymatically to cut the target RNA. Strategic cleavage of such a target RNA will destroy its ability to direct synthesis of an encoded protein. After an enzymatic nucleic acid has bound and cleaved its RNA target, it is released from that RNA to search for another target and can repeatedly bind and cleave new targets.

[0160] The enzymatic nature of a ribozyme is advantageous over many technologies, such as antisense technology (where a nucleic acid molecule simply binds to a nucleic acid target to block its translation) since the concentration of ribozyme necessary to affect a therapeutic treatment is lower than that of an antisense oligonucleotide. This advantage reflects the ability of the ribozyme to act enzymatically. Thus, a single ribozyme molecule is able to cleave many molecules of target RNA. In addition, the ribozyme is a highly specific inhibitor, with the specificity of inhibition depending not only on the base pairing mechanism of binding to the target RNA, but also on the mechanism of target RNA cleavage. Single mismatches, or base-substitutions, near the site of cleavage can completely eliminate catalytic activity of a ribozyme. Similar mismatches in antisense molecules do not prevent their action (Woolf et al., 1992). Thus, the specificity of action of a ribozyme is greater than that of an antisense oligonucleotide binding the same RNA site.

[0161] The enzymatic nucleic acid molecule may be formed in a hammerhead, hairpin, a hepatitis δ virus, group I intron or RNaseP RNA (in association with an RNA guide sequence) or Neurospora VS RNA motif. Examples of hammerhead motifs are described by Rossi et al. (1992). Examples of hairpin motifs are described by Hampel et al. (Eur. Pat. Appl. Publ. No. EP 0360257), Hampel and Tritz (1989), Hampel et al. (1990) and U.S. Pat. No. 5,631,359 (specifically incorporated herein by reference). An example of the hepatitis δ virus motif is described by Perrotta and Been (1992); an example of the RNaseP motif is described by Guerrier-Takada et al. (1983); Neurospora VS RNA ribozyme motif is described by Collins (Saville and Collins, 1990; Saville and Collins, 1991; Collins and Olive, 1993); and an example of the Group I intron is described in (U.S. Pat. No. 4,987,071, specifically incorporated herein by reference). All that is important in an enzymatic nucleic acid molecule of this invention is that it has a specific substrate binding site which is complementary to one or more of the target gene RNA regions, and that it have nucleotide sequences within or surrounding that substrate binding site which impart an RNA cleaving activity to the molecule. Thus the ribozyme constructs need not be limited to specific motifs mentioned herein.

[0162] In certain embodiments, it may be important to produce enzymatic cleaving agents which exhibit a high degree of specificity for the RNA of a desired target, such as one of the sequences disclosed herein. The enzymatic nucleic acid molecule is preferably targeted to a highly conserved sequence region of a target mRNA. Such enzymatic nucleic acid molecules can be delivered exogenously to specific cells as required. Alternatively, the ribozymes can be expressed from DNA or RNA vectors that are delivered to specific cells.

[0163] Small enzymatic nucleic acid motifs (e.g., of the hammerhead or the hairpin structure) may also be used for exogenous delivery. The simple structure of these molecules increases the ability of the enzymatic nucleic acid to invade targeted regions of the mRNA structure. Alternatively, catalytic RNA molecules can be expressed within cells from eukaryotic promoters (e.g., Scanlon et al., 1991; Kashani-Sabet et al., 1992; Dropulic et al., 1992; Weerasinghe et al., 1991; Ojwang et al., 1992; Chen et al., 1992; Sarver et al., 1990). Those skilled in the art realize that any ribozyme can be expressed in eukaryotic cells from the appropriate DNA vector. The activity of such ribozymes can be augmented by their release from the primary transcript by a second ribozyme (Int. Pat. Appl. Publ. No. WO 93/23569, and Int. Pat. Appl. Publ. No. WO 94/02595, both hereby incorporated by reference; Ohkawa et al., 1992; Taira et al., 1991; and Ventura et al., 1993).

[0164] Ribozymes may be added directly, or can be complexed with cationic lipids, lipid complexes, packaged within liposomes, or otherwise delivered to target cells. The RNA or RNA complexes can be locally administered to relevant tissues ex vivo, or in vivo through injection, aerosol inhalation, infusion pump or stent, with or without their incorporation in biopolymers.

[0165] Ribozymes may be designed as described in Int. Pat. Appl. Publ. No. WO 93/23569 and Int. Pat. Appl. Publ. No. WO 94/02595, each specifically incorporated herein by reference) and synthesized to be tested in vitro and in vivo, as described. Such ribozymes can also be optimized for delivery. While specific examples are provided, those in the art will recognize that equivalent RNA targets in other species can be utilized when necessary.

[0166] Hammerhead or hairpin ribozymes may be individually analyzed by computer folding (Jaeger et al., 1989) to assess whether the ribozyme sequences fold into the appropriate secondary structure. Those ribozymes with unfavorable intramolecular interactions between the binding arms and the catalytic core are eliminated from consideration. Varying binding arm lengths can be chosen to optimize activity. Generally, at least 5 or so bases on each arm are able to bind to, or otherwise interact with, the target RNA.

[0167] Ribozymes of the hammerhead or hairpin motif may be designed to anneal to various sites in the mRNA message, and can be chemically synthesized. The method of synthesis used follows the procedure for normal RNA synthesis as described in Usman et al. (1987) and in Scaringe et al. (1990) and makes use of common nucleic acid protecting and coupling groups, such as dimethoxytrityl at the 5′-end, and phosphoramidites at the 3′-end. Average stepwise coupling yields are typically >98%. Hairpin ribozymes may be synthesized in two parts and annealed to reconstruct an active ribozyme (Chowrira and Burke, 1992). Ribozymes may be modified extensively to enhance stability by modification with nuclease resistant groups, for example, 2′-amino, 2′-C-allyl, 2′-flouro, 2′-o-methyl, 2′-H (for a review see e.g., Usman and Cedergren, 1992). Ribozymes may be purified by gel electrophoresis using general methods or by high pressure liquid chromatography and resuspended in water.

[0168] Ribozyme activity can be optimized by altering the length of the ribozyme binding arms, or chemically synthesizing ribozymes with modifications that prevent their degradation by serum ribonucleases (see e.g., Int. Pat. Appl. Publ. No. WO 92/07065; Perrault et al, 1990; Pieken et al., 1991; Usman and Cedergren, 1992; Int. Pat. Appl. Publ. No. WO 93/15187; Int. Pat. Appl. Publ. No. WO 91/03162; Eur. Pat. Appl. Publ. No. 92110298.4; U.S. Pat. No. 5,334,711; and Int. Pat. Appl. Publ. No. WO 94/13688, which describe various chemical modifications that can be made to the sugar moieties of enzymatic RNA molecules), modifications which enhance their efficacy in cells, and removal of stem II bases to shorten RNA synthesis times and reduce chemical requirements.

[0169] Sullivan et al. (Int. Pat. Appl. Publ. No. WO 94/02595) describes the general methods for delivery of enzymatic RNA molecules. Ribozymes may be administered to cells by a variety of methods known to those familiar to the art, including, but not restricted to, encapsulation in liposomes, by iontophoresis, or by incorporation into other vehicles, such as hydrogels, cyclodextrins, biodegradable nanocapsules, and bioadhesive microspheres. For some indications, ribozymes may be directly delivered ex vivo to cells or tissues with or without the aforementioned vehicles. Alternatively, the RNA/vehicle combination may be locally delivered by direct inhalation, by direct injection or by use of a catheter, infusion pump or stent. Other routes of delivery include, but are not limited to, intravascular, intramuscular, subcutaneous or joint injection, aerosol inhalation, oral (tablet or pill form), topical, systemic, ocular, intraperitoneal and/or intrathecal delivery. More detailed descriptions of ribozyme delivery and administration are provided in Int. Pat. Appl. Publ. No. WO 94/02595 and Int. Pat. Appl. Publ. No. WO 93/23569, each specifically incorporated herein by reference.

[0170] Another means of accumulating high concentrations of a ribozyme(s) within cells is to incorporate the ribozyme-encoding sequences into a DNA expression vector. Transcription of the ribozyme sequences are driven from a promoter for eukaryotic RNA polymerase I (pol I), RNA polymerase II (pol II), or RNA polymerase III (pol III). Transcripts from pol II or pol III promoters will be expressed at high levels in all cells; the levels of a given pol II promoter in a given cell type will depend on the nature of the gene regulatory sequences (enhancers, silencers, etc.) present nearby. Prokaryotic RNA polymerase promoters may also be used, providing that the prokaryotic RNA polymerase enzyme is expressed in the appropriate cells (Elroy-Stein and Moss, 1990; Gao and Huang, 1993; Lieber et al., 1993; Zhou et al., 1990). Ribozymes expressed from such promoters can function in mammalian cells (e.g. Kashani-Saber et al., 1992; Ojwang et al., 1992; Chen et al., 1992; Yu et al., 1993; L'Huillier et al., 1992; Lisziewicz et al., 1993). Such transcription units can be incorporated into a variety of vectors for introduction into mammalian cells, including but not restricted to, plasmid DNA vectors, viral DNA vectors (such as adenovirus or adeno-associated vectors), or viral RNA vectors (such as retroviral, semliki forest virus, sindbis virus vectors).

[0171] Ribozymes of this invention may be used as diagnostic tools to examine genetic drift and mutations within diseased cells. They can also be used to assess levels of the target RNA molecule. The close relationship between ribozyme activity and the structure of the target RNA allows the detection of mutations in any region of the molecule which alters the base-pairing and three-dimensional structure of the target RNA. By using multiple ribozymes described in this invention, one may map nucleotide changes which are important to RNA structure and function in vitro, as well as in cells and tissues. Cleavage of target RNAs with ribozymes may be used to inhibit gene expression and define the role (essentially) of specified gene products in the progression of disease. In this manner, other genetic targets may be defined as important mediators of the disease. These studies will lead to better treatment of the disease progression by affording the possibility of combinational therapies (e.g., multiple ribozymes targeted to different genes, ribozymes coupled with known small molecule inhibitors, or intermittent treatment with combinations of ribozymes and/or other chemical or biological molecules). Other in vitro uses of ribozymes of this invention are well known in the art, and include detection of the presence of mRNA associated with an IL-5 related condition. Such RNA is detected by determining the presence of a cleavage product after treatment with a ribozyme using standard methodology.

[0172] Peptide Nucleic Acids

[0173] In certain embodiments, the inventors contemplate the use of peptide nucleic acids (PNAs) in the practice of the methods of the invention. PNA is a DNA mimic in which the nucleobases are attached to a pseudopeptide backbone (Good and Nielsen, 1997). PNA is able to be utilized in a number methods that traditionally have used RNA or DNA. Often PNA sequences perform better in techniques than the corresponding RNA or DNA sequences and have utilities that are not inherent to RNA or DNA. An excellent review of PNA including methods of making, characteristics of, and methods of using, is provided by Corey (1997) and is incorporated herein by reference. As such, in certain embodiments, one may prepare PNA sequences that are complementary to one or more portions of the ACE mRNA sequence, and such PNA compositions may be used to regulate, alter, decrease, or reduce the translation of ACE-specific mRNA, and thereby alter the level of ACE activity in a host cell to which such PNA compositions have been administered.

[0174] PNAs have 2-aminoethyl-glycine linkages replacing the normal phosphodiester backbone of DNA (Nielsen et al., 1991; Hanvey et al., 1992; Hyrup and Nielsen, 1996; Neilsen, 1996). This chemistry has three important consequences: firstly, in contrast to DNA or phosphorothioate oligonucleotides, PNAs are neutral molecules; secondly, PNAs are achiral, which avoids the need to develop a stereoselective synthesis; and thirdly, PNA synthesis uses standard Boc (Dueholm et al., 1994) or Fmoc (Thomson et al., 1995) protocols for solid-phase peptide synthesis, although other methods, including a modified Merrifield method, have been used (Christensen et al., 1995).

[0175] PNA monomers or ready-made oligomers are commercially available from PerSeptive Biosystems (Framingham, Mass., USA). PNA syntheses by either Boc or Fmoc protocols are straightforward using manual or automated protocols (Norton et al., 1995). The manual protocol lends itself to the production of chemically modified PNAs or the simultaneous synthesis of families of closely related PNAs.

[0176] As with peptide synthesis, the success of a particular PNA synthesis will depend on the properties of the chosen sequence. For example, while in theory PNAs can incorporate any combination of nucleotide bases, the presence of adjacent purines can lead to deletions of one or more residues in the product. In expectation of this difficulty, it is suggested that, in producing PNAs with adjacent purines, one should repeat the coupling of residues likely to be added inefficiently. This should be followed by the purification of PNAs by reverse-phase high-pressure liquid chromatography (Norton et al., 1995) providing yields and purity of product similar to those observed during the synthesis of peptides.

[0177] Modifications of PNAs for a given application may be accomplished by coupling amino acids during solid-phase synthesis or by attaching compounds that contain a carboxylic acid group to the exposed N-terminal amine. Alternatively, PNAs can be modified after synthesis by coupling to an introduced lysine or cysteine. The ease with which PNAs can be modified facilitates optimization for better solubility or for specific functional requirements. Once synthesized, the identity of PNAs and their derivatives can be confirmed by mass spectrometry. Several studies have made and utilized modifications of PNAs (Norton et al., 1995; Haaima et al., 1996; Stetsenko et al., 1996; Petersen et al., 1995; Ulmann et al., 1996; Koch et al., 1995; Orum et al., 1995; Footer et al., 1996; Griffith et al., 1995; Kremsky et al., 1996; Pardridge et al., 1995; Boffa et al., 1995; Landsdorp et al., 1996; Gambacorti-Passerini et al., 1996; Armitage et al., 1997; Seeger et al., 1997; Ruskowski et al., 1997). U.S. Pat. No. 5,700,922 discusses PNA-DNA-PNA chimeric molecules and their uses in diagnostics, modulating protein in organisms, and treatment of conditions susceptible to therapeutics.

[0178] In contrast to DNA and RNA, which contain negatively charged linkages, the PNA backbone is neutral. In spite of this dramatic alteration, PNAs recognize complementary DNA and RNA by Watson-Crick pairing (Egholm et al., 1993), validating the initial modeling by Nielsen et al. (1991). PNAs lack 3′ to 5′ polarity and can bind in either parallel or antiparallel fashion, with the antiparallel mode being preferred (Egholm et al., 1993).

[0179] Hybridization of DNA oligonucleotides to DNA and RNA is destabilized by electrostatic repulsion between the negatively charged phosphate backbones of the complementary strands. By contrast, the absence of charge repulsion in PNA-DNA or PNA-RNA duplexes increases the melting temperature (Tₘ) and reduces the dependence of Tₘ on the concentration of mono- or divalent cations (Nielsen et al., 1991). The enhanced rate and affinity of hybridization are significant because they are responsible for the surprising ability of PNAs to perform strand invasion of complementary sequences within relaxed double-stranded DNA. In addition, the efficient hybridization at inverted repeats suggests that PNAs can recognize secondary structure effectively within double-stranded DNA. Enhanced recognition also occurs with PNAs immobilized on surfaces, and Wang et al. have shown that support-bound PNAs can be used to detect hybridization events (Wang et al., 1996).

[0180] One might expect that tight binding of PNAs to complementary sequences would also increase binding to similar (but not identical) sequences, reducing the sequence specificity of PNA recognition. As with DNA hybridization, however, selective recognition can be achieved by balancing oligomer length and incubation temperature. Moreover, selective hybridization of PNAs is encouraged by PNA-DNA hybridization being less tolerant of base mismatches than DNA-DNA hybridization. For example, a single mismatch within a 16 bp PNA-DNA duplex can reduce the Tₘ by up to 15° C. (Egholm et al., 1993). This high level of discrimination has allowed the development of several PNA-based strategies for the analysis of point mutations (Wang et al., 1996; Carlsson et al., 1996; Thiede et al., 1996; Webb and Hurskainen, 1996; Perry-O'Keefe et al., 1996).

[0181] High-affinity binding provides clear advantages for molecular recognition and the development of new applications for PNAs. For example, 11-13 nucleotide PNAs inhibit the activity of telomerase, a ribonucleo-protein that extends telomere ends using an essential RNA template, while the analogous DNA oligomers do not (Norton et al., 1996).

[0182] Neutral PNAs are more hydrophobic than analogous DNA oligomers, and this can lead to difficulty solubilizing them at neutral pH, especially if the PNAs have a high purine content or if they have the potential to form secondary structures. Their solubility can be enhanced by attaching one or more positive charges to the PNA termini (Nielsen et al., 1991).

[0183] Findings by Allfrey and colleagues suggest that strand invasion will occur spontaneously at sequences within chromosomal DNA (Boffa et al., 1995; Boffa et al., 1996). These studies targeted PNAs to triplet repeats of the nucleotides CAG and used this recognition to purify transcriptionally active DNA (Boffa et al., 1995) and to inhibit transcription (Boffa et al., 1996). This result suggests that if PNAs can be delivered within cells then they will have the potential to be general sequence-specific regulators of gene expression. Studies and reviews concerning the use of PNAs as antisense and anti-gene agents include Nielsen et al. (1993b), Hanvey et al. (1992), and Good and Nielsen (1997). Koppelhus et al. (1997) have used PNAs to inhibit HIV-1 inverse transcription, showing that PNAs may be used for antiviral therapies.

[0184] Methods of characterizing the antisense binding properties of PNAs are discussed in Rose (1993) and Jensen et al. (1997). Rose uses capillary gel electrophoresis to determine binding of PNAs to their complementary oligonucleotide, measuring the relative binding kinetics and stoichiometry. Similar types of measurements were made by Jensen et al. using BLAcore™ technology.

[0185] Other applications of PNAs include use in DNA strand invasion (Nielsen et al., 1991), antisense inhibition (Hanvey et al., 1992), mutational analysis (Orum et al., 1993), enhancers of transcription (Mollegaard et al., 1994), nucleic acid purification (Orum et al., 1995), isolation of transcriptionally active genes (Boffa et al., 1995), blocking of transcription factor binding (Vickers et al., 1995), genome cleavage (Veselkov et al., 1996), biosensors (Wang et al., 1996), in situ hybridization (Thisted et al., 1996), and in a alternative to Southern blotting (Perry-O'Keefe, 1996).

[0186] Polypeptide Compositions

[0187] The present invention, in other aspects, provides polypeptide compositions. Generally, a polypeptide of the invention will be an isolated polypeptide (or an epitope, variant, or active fragment thereof) derived from a mammalian species. Preferably, the polypeptide is encoded by a polynucleotide sequence disclosed herein or a sequence which hybridizes under moderately stringent conditions to a polynucleotide sequence disclosed herein.

[0188] In the present invention, a polypeptide composition is also understood to comprise one or more polypeptides that are immunologically reactive with antibodies generated against an polypeptide of the invention, particularly a polypeptide encoded by the nucleic acid sequence disclosed in SEQ ID NOs:1-1730, or to active fragments, or to variants or biological functional equivalents thereof.

[0189] Likewise, a polypeptide composition of the present invention is understood to comprise one or more polypeptides that are capable of eliciting antibodies that are immunologically reactive with one or more polypeptides encoded by one or more contiguous nucleic acid sequences contained in SEQ ID NOs:1-1730, or to active fragments, or to strain variants thereof, or to one or more nucleic acid sequences which hybridize to one or more of these sequences under conditions of moderate to high stringency.

[0190] As used herein, an active fragment of a polypeptide includes a whole or a portion of a polypeptide which is modified by conventional techniques, e.g., mutagenesis, or by addition, deletion, or substitution, but which active fragment exhibits substantially the same structure function, antigenicity, etc., as a native polypeptide as described herein.

[0191] In certain illustrative embodiments, the polypeptides of the invention will comprise at least an immunogenic portion of an ovarian tumor protein or a variant thereof, as described herein. As noted above, an “ovarian tumor protein” is a protein that is expressed by ovarian tumor cells. Proteins that are ovarian tumor proteins also react detectably within an immunoassay (such as an ELISA) with antisera from a patient with ovarian cancer. Polypeptides as described herein may be of any length. Additional sequences derived from the native protein and/or heterologous sequences may be present, and such sequences may (but need not) possess further immunogenic or antigenic properties.

[0192] An “immunogenic portion,” as used herein is a portion of a protein that is recognized (i.e., specifically bound) by a B-cell and/or T-cell surface antigen receptor. Such immunogenic portions generally comprise at least 5 amino acid residues, more preferably at least 10, and still more preferably at least 20 amino acid residues of an ovarian tumor protein or a variant thereof. Certain preferred immunogenic portions include peptides in which an N-terminal leader sequence and/or transmembrane domain have been deleted. Other preferred immunogenic portions may contain a small N- and/or C-terminal deletion (e.g., 1-30 amino acids, preferably 5-15 amino acids), relative to the mature protein.

[0193] Immunogenic portions may generally be identified using well known techniques, such as those summarized in Paul, Fundamental Immunology, 3rd ed., 243-247 (Raven Press, 1993) and references cited therein. Such techniques include screening polypeptides for the ability to react with antigen-specific antibodies, antisera and/or T-cell lines or clones. As used herein, antisera and antibodies are “antigen-specific” if they specifically bind to an antigen (i.e., they react with the protein in an ELISA or other immunoassay, and do not react detectably with unrelated proteins). Such antisera and antibodies may be prepared as described herein, and using well known techniques. An immunogenic portion of a native ovarian tumor protein is a portion that reacts with such antisera and/or T-cells at a level that is not substantially less than the reactivity of the full length polypeptide (e.g., in an ELISA and/or T-cell reactivity assay). Such immunogenic portions may react within such assays at a level that is similar to or greater than the reactivity of the full length polypeptide. Such screens may generally be performed using methods well known to those of ordinary skill in the art, such as those described in Harlow and Lane, Antibodies: A Laboratory Manual, Cold Spring Harbor Laboratory, 1988. For example, a polypeptide may be immobilized on a solid support and contacted with patient sera to allow binding of antibodies within the sera to the immobilized polypeptide. Unbound sera may then be removed and bound antibodies detected using, for example, ¹²⁵I-labeled Protein A.

[0194] As noted above, a composition may comprise a variant of a native ovarian tumor protein. A polypeptide “variant,” as used herein, is a polypeptide that differs from a native ovarian tumor protein in one or more substitutions, deletions, additions and/or insertions, such that the immunogenicity of the polypeptide is not substantially diminished. In other words, the ability of a variant to react with antigen-specific antisera may be enhanced or unchanged, relative to the native protein, or may be diminished by less than 50%, and preferably less than 20%, relative to the native protein. Such variants may generally be identified by modifying one of the above polypeptide sequences and evaluating the reactivity of the modified polypeptide with antigen-specific antibodies or antisera as described herein. Preferred variants include those in which one or more portions, such as an N-terminal leader sequence or transmembrane domain, have been removed. Other preferred variants include variants in which a small portion (e.g., 1-30 amino acids, preferably 5-15 amino acids) has been removed from the N- and/or C-terminal of the mature protein.

[0195] Polypeptide variants encompassed by the present invention include those exhibiting at least about 70%, 75%, 80%, 85%, 90%, 91%, 92%, 93%, 94%, 95%, 96%, 97%, 98%, or 99% or more identity (determined as described above) to the polypeptides disclosed herein.

[0196] Preferably, a variant contains conservative substitutions. A “conservative substitution” is one in which an amino acid is substituted for another amino acid that has similar properties, such that one skilled in the art of peptide chemistry would expect the secondary structure and hydropathic nature of the polypeptide to be substantially unchanged. Amino acid substitutions may generally be made on the basis of similarity in polarity, charge, solubility, hydrophobicity, hydrophilicity and/or the amphipathic nature of the residues. For example, negatively charged amino acids include aspartic acid and glutamic acid; positively charged amino acids include lysine and arginine; and amino acids with uncharged polar head groups having similar hydrophilicity values include leucine, isoleucine and valine; glycine and alanine; asparagine and glutamine; and serine, threonine, phenylalanine and tyrosine. Other groups of amino acids that may represent conservative changes include: (1) ala, pro, gly, glu, asp, gln, asn, ser, thr; (2) cys, ser, tyr, thr; (3) val, ile, leu, met, ala, phe; (4) lys, arg, his; and (5) phe, tyr, trp, his. A variant may also, or alternatively, contain nonconservative changes. In a preferred embodiment, variant polypeptides differ from a native sequence by substitution, deletion or addition of five amino acids or fewer. Variants may also (or alternatively) be modified by, for example, the deletion or addition of amino acids that have minimal influence on the immunogenicity, secondary structure and hydropathic nature of the polypeptide.

[0197] As noted above, polypeptides may comprise a signal (or leader) sequence at the N-terminal end of the protein, which co-translationally or post-translationally directs transfer of the protein. The polypeptide may also be conjugated to a linker or other sequence for ease of synthesis, purification or identification of the polypeptide (e.g., poly-His), or to enhance binding of the polypeptide to a solid support. For example, a polypeptide may be conjugated to an immunoglobulin Fc region.

[0198] Polypeptides may be prepared using any of a variety of well known techniques. Recombinant polypeptides encoded by DNA sequences as described above may be readily prepared from the DNA sequences using any of a variety of expression vectors known to those of ordinary skill in the art. Expression may be achieved in any appropriate host cell that has been transformed or transfected with an expression vector containing a DNA molecule that encodes a recombinant polypeptide. Suitable host cells include prokaryotes, yeast, and higher eukaryotic cells, such as mammalian cells and plant cells. Preferably, the host cells employed are E. coli , yeast or a mammalian cell line such as COS or CHO. Supernatants from suitable host/vector systems which secrete recombinant protein or polypeptide into culture media may be first concentrated using a commercially available filter. Following concentration, the concentrate may be applied to a suitable purification matrix such as an affinity matrix or an ion exchange resin. Finally, one or more reverse phase HPLC steps can be employed to further purify a recombinant polypeptide.

[0199] Portions and other variants having less than about 100 amino acids, and generally less than about 50 amino acids, may also be generated by synthetic means, using techniques well known to those of ordinary skill in the art. For example, such polypeptides may be synthesized using any of the commercially available solid-phase techniques, such as the Merrifield solid-phase synthesis method, where amino acids are sequentially added to a growing amino acid chain. See Merrifield, J. Am. Chem. Soc. 85:2149-2146, 1963. Equipment for automated synthesis of polypeptides is commercially available from suppliers such as Perkin Elmer/Applied BioSystems Division (Foster City, Calif.), and may be operated according to the manufacturer's instructions.

[0200] Within certain specific embodiments, a polypeptide may be a fusion protein that comprises multiple polypeptides as described herein, or that comprises at least one polypeptide as described herein and an unrelated sequence, such as a known tumor protein. A fusion partner may, for example, assist in providing T helper epitopes (an immunological fusion partner), preferably T helper epitopes recognized by humans, or may assist in expressing the protein (an expression enhancer) at higher yields than the native recombinant protein. Certain preferred fusion partners are both immunological and expression enhancing fusion partners. Other fusion partners may be selected so as to increase the solubility of the protein or to enable the protein to be targeted to desired intracellular compartments. Still further fusion partners include affinity tags, which facilitate purification of the protein.

[0201] Fusion proteins may generally be prepared using standard techniques, including chemical conjugation. Preferably, a fusion protein is expressed as a recombinant protein, allowing the production of increased levels, relative to a non-fused protein, in an expression system. Briefly, DNA sequences encoding the polypeptide components may be assembled separately, and ligated into an appropriate expression vector. The 3′ end of the DNA sequence encoding one polypeptide component is ligated, with or without a peptide linker, to the 5′ end of a DNA sequence encoding the second polypeptide component so that the reading frames of the sequences are in phase. This permits translation into a single fusion protein that retains the biological activity of both component polypeptides.

[0202] A peptide linker sequence may be employed to separate the first and second polypeptide components by a distance sufficient to ensure that each polypeptide folds into its secondary and tertiary structures. Such a peptide linker sequence is incorporated into the fusion protein using standard techniques well known in the art. Suitable peptide linker sequences may be chosen based on the following factors: (1) their ability to adopt a flexible extended conformation; (2) their inability to adopt a secondary structure that could interact with functional epitopes on the first and second polypeptides; and (3) the lack of hydrophobic or charged residues that might react with the polypeptide functional epitopes. Preferred peptide linker sequences contain Gly, Asn and Ser residues. Other near neutral amino acids, such as Thr and Ala may also be used in the linker sequence. Amino acid sequences which may be usefully employed as linkers include those disclosed in Maratea et al., Gene 40:39-46, 1985; Murphy et al., Proc. Natl. Acad. Sci. USA 83:8258-8262, 1986; U.S. Pat. No. 4,935,233 and U.S. Pat. No. 4,751,180. The linker sequence may generally be from 1 to about 50 amino acids in length. Linker sequences are not required when the first and second polypeptides have non-essential N-terminal amino acid regions that can be used to separate the functional domains and prevent steric interference.

[0203] The ligated DNA sequences are operably linked to suitable transcriptional or translational regulatory elements. The regulatory elements responsible for expression of DNA are located only 5′ to the DNA sequence encoding the first polypeptides. Similarly, stop codons required to end translation and transcription termination signals are only present 3′ to the DNA sequence encoding the second polypeptide.

[0204] Fusion proteins are also provided. Such proteins comprise a polypeptide as described herein together with an unrelated immunogenic protein. Preferably the immunogenic protein is capable of eliciting a recall response. Examples of such proteins include tetanus, tuberculosis and hepatitis proteins (see, for example, Stoute et al. New Engl. J. Med., 336:86-91, 1997).

[0205] Within preferred embodiments, an immunological fusion partner is derived from protein D, a surface protein of the gram-negative bacterium Haemophilus influenza B (WO 91/18926). Preferably, a protein D derivative comprises approximately the first third of the protein (e.g., the first N-terminal 100-110 amino acids), and a protein D derivative may be lipidated. Within certain preferred embodiments, the first 109 residues of a Lipoprotein D fusion partner is included on the N-terminus to provide the polypeptide with additional exogenous T-cell epitopes and to increase the expression level in E. coli (thus functioning as an expression enhancer). The lipid tail ensures optimal presentation of the antigen to antigen presenting cells. Other fusion partners include the non-structural protein from influenzae virus, NS 1 (hemaglutinin). Typically, the N-terminal 81 amino acids are used, although different fragments that include T-helper epitopes may be used.

[0206] In another embodiment, the immunological fusion partner is the protein known as LYTA, or a portion thereof (preferably a C-terminal portion). LYTA is derived from Streptococcus pneumoniae, which synthesizes an N-acetyl-L-alanine amidase known as amidase LYTA (encoded by the LytA gene; Gene 43:265-292, 1986). LYTA is an autolysin that specifically degrades certain bonds in the peptidoglycan backbone. The C-terminal domain of the LYTA protein is responsible for the affinity to the choline or to some choline analogues such as DEAE. This property has been exploited for the development of E. coli C-LYTA expressing plasmids useful for expression of fusion proteins. Purification of hybrid proteins containing the C-LYTA fragment at the amino terminus has been described (see Biotechnology 10:795-798, 1992). Within a preferred embodiment, a repeat portion of LYTA may be incorporated into a fusion protein. A repeat portion is found in the C-terminal region starting at residue 178. A particularly preferred repeat portion incorporates residues 188-305.

[0207] In general, polypeptides (including fusion proteins) and polynucleotides as described herein are isolated. An “isolated” polypeptide or polynucleotide is one that is removed from its original environment. For example, a naturally-occurring protein is isolated if it is separated from some or all of the coexisting materials in the natural system. Preferably, such polypeptides are at least about 90% pure, more preferably at least about 95% pure and most preferably at least about 99% pure. A polynucleotide is considered to be isolated if, for example, it is cloned into a vector that is not a part of the natural environment.

[0208] Binding Agents

[0209] The present invention further provides agents, such as antibodies and antigen-binding fragments thereof, that specifically bind to an ovarian tumor protein. As used herein, an antibody, or antigen-binding fragment thereof, is said to “specifically bind” to an ovarian tumor protein if it reacts at a detectable level (within, for example, an ELISA) with an ovarian tumor protein, and does not react detectably with unrelated proteins under similar conditions. As used herein, “binding” refers to a noncovalent association between two separate molecules such that a complex is formed. The ability to bind may be evaluated by, for example, determining a binding constant for the formation of the complex. The binding constant is the value obtained when the concentration of the complex is divided by the product of the component concentrations. In general, two compounds are said to “bind,” in the context of the present invention, when the binding constant for complex formation exceeds about 10³ L/mol. The binding constant may be determined using methods well known in the art.

[0210] Binding agents may be further capable of differentiating between patients with and without a cancer, such as ovarian cancer, using the representative assays provided herein. In other words, antibodies or other binding agents that bind to an ovarian tumor protein will generate a signal indicating the presence of a cancer in at least about 20% of patients with the disease, and will generate a negative signal indicating the absence of the disease in at least about 90% of individuals without the cancer. To determine whether a binding agent satisfies this requirement, biological samples (e.g., blood, sera, sputum, urine and/or tumor biopsies) from patients with and without a cancer (as determined using standard clinical tests) may be assayed as described herein for the presence of polypeptides that bind to the binding agent. It will be apparent that a statistically significant number of samples with and without the disease should be assayed. Each binding agent should satisfy the above criteria; however, those of ordinary skill in the art will recognize that binding agents may be used in combination to improve sensitivity.

[0211] Any agent that satisfies the above requirements may be a binding agent. For example, a binding agent may be a ribosome, with or without a peptide component, an RNA molecule or a polypeptide. In a preferred embodiment, a binding agent is an antibody or an antigen-binding fragment thereof. Antibodies may be prepared by any of a variety of techniques known to those of ordinary skill in the art. See, e.g., Harlow and Lane, Antibodies: A Laboratory Manual, Cold Spring Harbor Laboratory, 1988. In general, antibodies can be produced by cell culture techniques, including the generation of monoclonal antibodies as described herein, or via transfection of antibody genes into suitable bacterial or mammalian cell hosts, in order to allow for the production of recombinant antibodies. In one technique, an immunogen comprising the polypeptide is initially injected into any of a wide variety of mammals (e.g., mice, rats, rabbits, sheep or goats). In this step, the polypeptides of this invention may serve as the immunogen without modification. Alternatively, particularly for relatively short polypeptides, a superior immune response may be elicited if the polypeptide is joined to a carrier protein, such as bovine serum albumin or keyhole limpet hemocyanin. The immunogen is injected into the animal host, preferably according to a predetermined schedule incorporating one or more booster immunizations, and the animals are bled periodically. Polyclonal antibodies specific for the polypeptide may then be purified from such antisera by, for example, affinity chromatography using the polypeptide coupled to a suitable solid support.

[0212] Monoclonal antibodies specific for an antigenic polypeptide of interest may be prepared, for example, using the technique of Kohler and Milstein, Eur. J. Immunol. 6:511-519, 1976, and improvements thereto. Briefly, these methods involve the preparation of immortal cell lines capable of producing antibodies having the desired specificity (i.e., reactivity with the polypeptide of interest). Such cell lines may be produced, for example, from spleen cells obtained from an animal immunized as described above. The spleen cells are then immortalized by, for example, fusion with a myeloma cell fusion partner, preferably one that is syngeneic with the immunized animal. A variety of fusion techniques may be employed. For example, the spleen cells and myeloma cells may be combined with a nonionic detergent for a few minutes and then plated at low density on a selective medium that supports the growth of hybrid cells, but not myeloma cells. A preferred selection technique uses HAT (hypoxanthine, aminopterin, thymidine) selection. After a sufficient time, usually about 1 to 2 weeks, colonies of hybrids are observed. Single colonies are selected and their culture supernatants tested for binding activity against the polypeptide. Hybridomas having high reactivity and specificity are preferred.

[0213] Monoclonal antibodies may be isolated from the supernatants of growing hybridoma colonies. In addition, various techniques may be employed to enhance the yield, such as injection of the hybridoma cell line into the peritoneal cavity of a suitable vertebrate host, such as a mouse. Monoclonal antibodies may then be harvested from the ascites fluid or the blood. Contaminants may be removed from the antibodies by conventional techniques, such as chromatography, gel filtration, precipitation, and extraction. The polypeptides of this invention may be used in the purification process in, for example, an affinity chromatography step.

[0214] Within certain embodiments, the use of antigen-binding fragments of antibodies may be preferred. Such fragments include Fab fragments, which may be prepared using standard techniques. Briefly, immunoglobulins may be purified from rabbit serum by affinity chromatography on Protein A bead columns (Harlow and Lane, Antibodies: A Laboratory Manual, Cold Spring Harbor Laboratory, 1988) and digested by papain to yield Fab and Fc fragments. The Fab and Fc fragments may be separated by affinity chromatography on protein A bead columns.

[0215] Monoclonal antibodies of the present invention may be coupled to one or more therapeutic agents. Suitable agents in this regard include radionuclides, differentiation inducers, drugs, toxins, and derivatives thereof. Preferred radionuclides include ⁹⁰Y, ¹²³I, ¹²⁵I, ¹³¹I, ¹⁸⁶Re, ¹⁸⁸Re, ²¹¹At, and ²¹²Bi. Preferred drugs include methotrexate, and pyrimidine and purine analogs. Preferred differentiation inducers include phorbol esters and butyric acid. Preferred toxins include ricin, abrin, diptheria toxin, cholera toxin, gelonin, Pseudomonas exotoxin, Shigella toxin, and pokeweed antiviral protein.

[0216] A therapeutic agent may be coupled (e.g., covalently bonded) to a suitable monoclonal antibody either directly or indirectly (e.g., via a linker group). A direct reaction between an agent and an antibody is possible when each possesses a substituent capable of reacting with the other. For example, a nucleophilic group, such as an amino or sulfhydryl group, on one may be capable of reacting with a carbonyl-containing group, such as an anhydride or an acid halide, or with an alkyl group containing a good leaving group (e.g., a halide) on the other.

[0217] Alternatively, it may be desirable to couple a therapeutic agent and an antibody via a linker group. A linker group can function as a spacer to distance an antibody from an agent in order to avoid interference with binding capabilities. A linker group can also serve to increase the chemical reactivity of a substituent on an agent or an antibody, and thus increase the coupling efficiency. An increase in chemical reactivity may also facilitate the use of agents, or functional groups on agents, which otherwise would not be possible.

[0218] It will be evident to those skilled in the art that a variety of bifunctional or polyfunctional reagents, both homo- and hetero-functional (such as those described in the catalog of the Pierce Chemical Co., Rockford, Ill.), may be employed as the linker group. Coupling may be effected, for example, through amino groups, carboxyl groups, sulfhydryl groups or oxidized carbohydrate residues. There are numerous references describing such methodology, e.g., U.S. Pat. No. 4,671,958, to Rodwell et al.

[0219] Where a therapeutic agent is more potent when free from the antibody portion of the immunoconjugates of the present invention, it may be desirable to use a linker group which is cleavable during or upon internalization into a cell. A number of different cleavable linker groups have been described. The mechanisms for the intracellular release of an agent from these linker groups include cleavage by reduction of a disulfide bond (e.g., U.S. Pat. No. 4,489,710, to Spitler), by irradiation of a photolabile bond (e.g., U.S. Pat. No. 4,625,014, to Senter et al.), by hydrolysis of derivatized amino acid side chains (e.g., U.S. Pat. No. 4,638,045, to Kohn et al.), by serum complement-mediated hydrolysis (e.g., U.S. Pat. No. 4,671,958, to Rodwell et al.), and acid-catalyzed hydrolysis (e.g., U.S. Pat. No. 4,569,789, to Blattler et al.).

[0220] It may be desirable to couple more than one agent to an antibody. In one embodiment, multiple molecules of an agent are coupled to one antibody molecule. In another embodiment, more than one type of agent may be coupled to one antibody. Regardless of the particular embodiment, immunoconjugates with more than one agent may be prepared in a variety of ways. For example, more than one agent may be coupled directly to an antibody molecule, or linkers that provide multiple sites for attachment can be used. Alternatively, a carrier can be used.

[0221] A carrier may bear the agents in a variety of ways, including covalent bonding either directly or via a linker group. Suitable carriers include proteins such as albumins (e.g., U.S. Pat. No. 4,507,234, to Kato et al.), peptides and polysaccharides such as aminodextran (e.g., U.S. Pat. No. 4,699,784, to Shih et al.). A carrier may also bear an agent by noncovalent bonding or by encapsulation, such as within a liposome vesicle (e.g., U.S. Patent Nos. 4,429,008 and 4,873,088). Carriers specific for radionuclide agents include radiohalogenated small molecules and chelating compounds. For example, U.S. Pat. No. 4,735,792 discloses representative radiohalogenated small molecules and their synthesis. A radionuclide chelate may be formed from chelating compounds that include those containing nitrogen and sulfur atoms as the donor atoms for binding the metal, or metal oxide, radionuclide. For example, U.S. Pat. No. 4,673,562, to Davison et al. discloses representative chelating compounds and their synthesis.

[0222] A variety of routes of administration for the antibodies and immunoconjugates may be used. Typically, administration will be intravenous, intramuscular, subcutaneous or in the bed of a resected tumor. It will be evident that the precise dose of the antibody/immunoconjugate will vary depending upon the antibody used, the antigen density on the tumor, and the rate of clearance of the antibody.

[0223] T Cells

[0224] Immunotherapeutic compositions may also, or alternatively, comprise T cells specific for an ovarian tumor protein. Such cells may generally be prepared in vitro or ex vivo, using standard procedures. For example, T cells may be isolated from bone marrow, peripheral blood, or a fraction of bone marrow or peripheral blood of a patient, using a commercially available cell separation system, such as the Isolex™ System, available from Nexell Therapeutics, Inc. (Irvine, Calif.; see also U.S. Pat. No. 5,240,856; U.S. Pat. No. 5,215,926; WO 89/06280; WO 91/16116 and WO 92/07243). Alternatively, T cells may be derived from related or unrelated humans, non-human mammals, cell lines or cultures.

[0225] T cells may be stimulated with an ovarian tumor polypeptide, polynucleotide encoding an ovarian tumor polypeptide and/or an antigen presenting cell (APC) that expresses such a polypeptide. Such stimulation is performed under conditions and for a time sufficient to permit the generation of T cells that are specific for the polypeptide. Preferably, an ovarian tumor polypeptide or polynucleotide is present within a delivery vehicle, such as a microsphere, to facilitate the generation of specific T cells.

[0226] T cells are considered to be specific for an ovarian tumor polypeptide if the T cells specifically proliferate, secrete cytokines or kill target cells coated with the polypeptide or expressing a gene encoding the polypeptide. T cell specificity may be evaluated using any of a variety of standard techniques. For example, within a chromium release assay or proliferation assay, a stimulation index of more than two fold increase in lysis and/or proliferation, compared to negative controls, indicates T cell specificity. Such assays may be performed, for example, as described in Chen et al., Cancer Res. 54:1065-1070, 1994. Alternatively, detection of the proliferation of T cells may be accomplished by a variety of known techniques. For example, T cell proliferation can be detected by measuring an increased rate of DNA synthesis (e.g., by pulse-labeling cultures of T cells with tritiated thymidine and measuring the amount of tritiated thymidine incorporated into DNA). Contact with an ovarian tumor polypeptide (100 ng/ml -100 μg/ml, preferably 200 ng/ml -25 μg/ml) for 3-7 days should result in at least a two fold increase in proliferation of the T cells. Contact as described above for 2-3 hours should result in activation of the T cells, as measured using standard cytokine assays in which a two fold increase in the level of cytokine release (e.g., TNF or IFN-γ) is indicative of T cell activation (see Coligan et al., Current Protocols in Immunology, vol. 1, Wiley Interscience (Greene 1998)). T cells that have been activated in response to an ovarian tumor polypeptide, polynucleotide or polypeptide-expressing APC may be CD4⁺ and/or CD8⁺. Ovarian tumor protein-specific T cells may be expanded using standard techniques. Within preferred embodiments, the T cells are derived from a patient, a related donor or an unrelated donor, and are administered to the patient following stimulation and expansion.

[0227] For therapeutic purposes, CD4⁺ or CD8⁺ T cells that proliferate in response to an ovarian tumor polypeptide, polynucleotide or APC can be expanded in number either in vitro or in vivo. Proliferation of such T cells in vitro may be accomplished in a variety of ways. For example, the T cells can be re-exposed to an ovarian tumor polypeptide, or a short peptide corresponding to an immunogenic portion of such a polypeptide, with or without the addition of T cell growth factors, such as interleukin-2, and/or stimulator cells that synthesize an ovarian tumor polypeptide. Alternatively, one or more T cells that proliferate in the presence of an ovarian tumor protein can be expanded in number by cloning. Methods for cloning cells are well known in the art, and include limiting dilution.

[0228] Pharmaceutical Compositions

[0229] In additional embodiments, the present invention concerns formulation of one or more of the polynucleotide, polypeptide, T-cell and/or antibody compositions disclosed herein in pharmaceutically-acceptable solutions for administration to a cell or an animal, either alone, or in combination with one or more other modalities of therapy.

[0230] It will also be understood that, if desired, the nucleic acid segment, RNA, DNA or PNA compositions that express a polypeptide as disclosed herein may be administered in combination with other agents as well, such as, e.g., other proteins or polypeptides or various pharmaceutically-active agents. In fact, there is virtually no limit to other components that may also be included, given that the additional agents do not cause a significant adverse effect upon contact with the target cells or host tissues. The compositions may thus be delivered along with various other agents as required in the particular instance. Such compositions may be purified from host cells or other biological sources, or alternatively may be chemically synthesized as described herein. Likewise, such compositions may further comprise substituted or derivatized RNA or DNA compositions.

[0231] Formulation of pharmaceutically-acceptable excipients and carrier solutions is well-known to those of skill in the art, as is the development of suitable dosing and treatment regimens for using the particular compositions described herein in a variety of treatment regimens, including e.g., oral, parenteral, intravenous, intranasal, and intramuscular administration and formulation.

[0232] 1. Oral Delivery

[0233] In certain applications, the pharmaceutical compositions disclosed herein may be delivered via oral administration to an animal. As such, these compositions may be formulated with an inert diluent or with an assimilable edible carrier, or they may be enclosed in hard- or soft-shell gelatin capsule, or they may be compressed into tablets, or they may be incorporated directly with the food of the diet.

[0234] The active compounds may even be incorporated with excipients and used in the form of ingestible tablets, buccal tables, troches, capsules, elixirs, suspensions, syrups, wafers, and the like (Mathiowitz et al., 1997; Hwang et al., 1998; U.S. Pat. No. 5,641,515; U.S. Pat. No. 5,580,579 and U.S. Pat. No. 5,792,451, each specifically incorporated herein by reference in its entirety). The tablets, troches, pills, capsules and the like may also contain the following: a binder, as gum tragacanth, acacia, cornstarch, or gelatin; excipients, such as dicalcium phosphate; a disintegrating agent, such as corn starch, potato starch, alginic acid and the like; a lubricant, such as magnesium stearate; and a sweetening agent, such as sucrose, lactose or saccharin may be added or a flavoring agent, such as peppermint, oil of wintergreen, or cherry flavoring. When the dosage unit form is a capsule, it may contain, in addition to materials of the above type, a liquid carrier. Various other materials may be present as coatings or to otherwise modify the physical form of the dosage unit. For instance, tablets, pills, or capsules may be coated with shellac, sugar, or both. A syrup of elixir may contain the active compound sucrose as a sweetening agent methyl and propylparabens as preservatives, a dye and flavoring, such as cherry or orange flavor. Of course, any material used in preparing any dosage unit form should be pharmaceutically pure and substantially non-toxic in the amounts employed. In addition, the active compounds may be incorporated into sustained-release preparation and formulations.

[0235] Typically, these formulations may contain at least about 0.1% of the active compound or more, although the percentage of the active ingredient(s) may, of course, be varied and may conveniently be between about 1 or 2% and about 60% or 70% or more of the weight or volume of the total formulation. Naturally, the amount of active compound(s) in each therapeutically useful composition may be prepared is such a way that a suitable dosage will be obtained in any given unit dose of the compound. Factors such as solubility, bioavailability, biological half-life, route of administration, product shelf life, as well as other pharmacological considerations will be contemplated by one skilled in the art of preparing such pharmaceutical formulations, and as such, a variety of dosages and treatment regimens may be desirable.

[0236] For oral administration the compositions of the present invention may alternatively be incorporated with one or more excipients in the form of a mouthwash, dentifrice, buccal tablet, oral spray, or sublingual orally-administered formulation. For example, a mouthwash may be prepared incorporating the active ingredient in the required amount in an appropriate solvent, such as a sodium borate solution (Dobell's Solution). Alternatively, the active ingredient may be incorporated into an oral solution such as one containing sodium borate, glycerin and potassium bicarbonate, or dispersed in a dentifrice, or added in a therapeutically-effective amount to a composition that may include water, binders, abrasives, flavoring agents, foaming agents, and humectants. Alternatively the compositions may be fashioned into a tablet or solution form that may be placed under the tongue or otherwise dissolved in the mouth.

[0237] 2. Injectable Delivery

[0238] In certain circumstances it will be desirable to deliver the pharmaceutical compositions disclosed herein parenterally, intravenously, intramuscularly, or even intraperitoneally as described in U.S. Pat. No. 5,543,158; U.S. Pat. No. 5,641,515 and U.S. Pat. No. 5,399,363 (each specifically incorporated herein by reference in its entirety). Solutions of the active compounds as free base or pharmacologically acceptable salts may be prepared in water suitably mixed with a surfactant, such as hydroxypropylcellulose. Dispersions may also be prepared in glycerol, liquid polyethylene glycols, and mixtures thereof and in oils. Under ordinary conditions of storage and use, these preparations contain a preservative to prevent the growth of microorganisms.

[0239] The pharmaceutical forms suitable for injectable use include sterile aqueous solutions or dispersions and sterile powders for the extemporaneous preparation of sterile injectable solutions or dispersions (U.S. Pat. No. 5,466,468, specifically incorporated herein by reference in its entirety). In all cases the form must be sterile and must be fluid to the extent that easy syringability exists. It must be stable under the conditions of manufacture and storage and must be preserved against the contaminating action of microorganisms, such as bacteria and fungi. The carrier can be a solvent or dispersion medium containing, for example, water, ethanol, polyol (e.g., glycerol, propylene glycol, and liquid polyethylene glycol, and the like), suitable mixtures thereof, and/or vegetable oils. Proper fluidity may be maintained, for example, by the use of a coating, such as lecithin, by the maintenance of the required particle size in the case of dispersion and by the use of surfactants. The prevention of the action of microorganisms can be facilitated by various antibacterial and antifungal agents, for example, parabens, chlorobutanol, phenol, sorbic acid, thimerosal, and the like. In many cases, it will be preferable to include isotonic agents, for example, sugars or sodium chloride. Prolonged absorption of the injectable compositions can be brought about by the use in the compositions of agents delaying absorption, for example, aluminum monostearate and gelatin.

[0240] For parenteral administration in an aqueous solution, for example, the solution should be suitably buffered if necessary and the liquid diluent first rendered isotonic with sufficient saline or glucose. These particular aqueous solutions are especially suitable for intravenous, intramuscular, subcutaneous and intraperitoneal administration. In this connection, a sterile aqueous medium that can be employed will be known to those of skill in the art in light of the present disclosure. For example, one dosage may be dissolved in 1 ml of isotonic NaCl solution and either added to 1000 ml of hypodermoclysis fluid or injected at the proposed site of infusion, (see for example, “Remington's Pharmaceutical Sciences” 15th Edition, pages 1035-1038 and 1570-1580). Some variation in dosage will necessarily occur depending on the condition of the subject being treated. The person responsible for administration will, in any event, determine the appropriate dose for the individual subject. Moreover, for human administration, preparations should meet sterility, pyrogenicity, and the general safety and purity standards as required by FDA Office of Biologics standards.

[0241] Sterile injectable solutions are prepared by incorporating the active compounds in the required amount in the appropriate solvent with various of the other ingredients enumerated above, as required, followed by filtered sterilization. Generally, dispersions are prepared by incorporating the various sterilized active ingredients into a sterile vehicle which contains the basic dispersion medium and the required other ingredients from those enumerated above. In the case of sterile powders for the preparation of sterile injectable solutions, the preferred methods of preparation are vacuum-drying and freeze-drying techniques which yield a powder of the active ingredient plus any additional desired ingredient from a previously sterile-filtered solution thereof.

[0242] The compositions disclosed herein may be formulated in a neutral or salt form. Pharmaceutically-acceptable salts, include the acid addition salts (formed with the free amino groups of the protein) and which are formed with inorganic acids such as, for example, hydrochloric or phosphoric acids, or such organic acids as acetic, oxalic, tartaric, mandelic, and the like. Salts formed with the free carboxyl groups can also be derived from inorganic bases such as, for example, sodium, potassium, ammonium, calcium, or ferric hydroxides, and such organic bases as isopropylamine, trimethylamine, histidine, procaine and the like. Upon formulation, solutions will be administered in a manner compatible with the dosage formulation and in such amount as is therapeutically effective. The formulations are easily administered in a variety of dosage forms such as injectable solutions, drug-release capsules, and the like.

[0243] As used herein, “carrier” includes any and all solvents, dispersion media, vehicles, coatings, diluents, antibacterial and antifungal agents, isotonic and absorption delaying agents, buffers, carrier solutions, suspensions, colloids, and the like. The use of such media and agents for pharmaceutical active substances is well known in the art. Except insofar as any conventional media or agent is incompatible with the active ingredient, its use in the therapeutic compositions is contemplated. Supplementary active ingredients can also be incorporated into the compositions.

[0244] The phrase “pharmaceutically-acceptable” refers to molecular entities and compositions that do not produce an allergic or similar untoward reaction when administered to a human. The preparation of an aqueous composition that contains a protein as an active ingredient is well understood in the art. Typically, such compositions are prepared as injectables, either as liquid solutions or suspensions; solid forms suitable for solution in, or suspension in, liquid prior to injection can also be prepared. The preparation can also be emulsified.

[0245] 3. Nasal Delivery

[0246] In certain embodiments, the pharmaceutical compositions may be delivered by intranasal sprays, inhalation, and/or other aerosol delivery vehicles. Methods for delivering genes, nucleic acids, and peptide compositions directly to the lungs via nasal aerosol sprays has been described e.g., in U.S. Pat. No. 5,756,353 and U.S. Pat. No. 5,804,212 (each specifically incorporated herein by reference in its entirety). Likewise, the delivery of drugs using intranasal microparticle resins (Takenaga et al., 1998) and lysophosphatidyl-glycerol compounds (U.S. Pat. No. 5,725,871, specifically incorporated herein by reference in its entirety) are also well-known in the pharmaceutical arts. Likewise, transmucosal drug delivery in the form of a polytetrafluoroetheylene support matrix is described in U.S. Pat. No. 5,780,045 (specifically incorporated herein by reference in its entirety).

[0247] 4. Liposome-, Nanocapsule-, and Microparticle-Mediated Delivery

[0248] In certain embodiments, the inventors contemplate the use of liposomes, nanocapsules, microparticles, microspheres, lipid particles, vesicles, and the like, for the introduction of the compositions of the present invention into suitable host cells. In particular, the compositions of the present invention may be formulated for delivery either encapsulated in a lipid particle, a liposome, a vesicle, a nanosphere, or a nanoparticle or the like.

[0249] Such formulations may be preferred for the introduction of pharmaceutically-acceptable formulations of the nucleic acids or constructs disclosed herein. The formation and use of liposomes is generally known to those of skill in the art (see for example, Couvreur et al, 1977; Couvreur, 1988; Lasic, 1998; which describes the use of liposomes and nanocapsules in the targeted antibiotic therapy for intracellular bacterial infections and diseases). Recently, liposomes were developed with improved serum stability and circulation half-times (Gabizon and Papahadjopoulos, 1988; Allen and Choun, 1987; U.S. Pat. No. 5,741,516, specifically incorporated herein by reference in its entirety). Further, various methods of liposome and liposome like preparations as potential drug carriers have been reviewed (Takakura, 1998; Chandran et al., 1997; Margalit, 1995; U.S. Pat. No. 5,567,434; U.S. Pat. No. 5,552,157; U.S. Pat. No. 5,565,213; U.S. Patent 5,738,868 and U.S. Pat. No. 5,795,587, each specifically incorporated herein by reference in its entirety).

[0250] Liposomes have been used successfully with a number of cell types that are normally resistant to transfection by other procedures including T cell suspensions, primary hepatocyte cultures and PC 12 cells (Renneisen et al, 1990; Muller et al., 1990). In addition, liposomes are free of the DNA length constraints that are typical of viral-based delivery systems. Liposomes have been used effectively to introduce genes, drugs (Heath and Martin, 1986; Heath et al., 1986; Balazsovits et al., 1989; Fresta and Puglisi, 1996), radiotherapeutic agents (Pikul et al., 1987), enzymes (Imaizumi et al., 1990a; Imaizumi et al., 1990b), viruses (Faller and Baltimore, 1984), transcription factors and allosteric effectors (Nicolau and Gersonde, 1979) into a variety of cultured cell lines and animals. In addition, several successful clinical trails examining the effectiveness of liposome-mediated drug delivery have been completed (Lopez-Berestein et al., 1985a; 1985b; Coune, 1988; Sculier et al., 1988). Furthermore, several studies suggest that the use of liposomes is not associated with autoimmune responses, toxicity or gonadal localization after systemic delivery (Mori and Fukatsu, 1992).

[0251] Liposomes are formed from phospholipids that are dispersed in an aqueous medium and spontaneously form multilamellar concentric bilayer vesicles (also termed multilamellar vesicles (MLVs). MLVs generally have diameters of from 25 nm to 4 μm. Sonication of MLVs results in the formation of small unilamellar vesicles (SUVs) with diameters in the range of 200 to 500 Å, containing an aqueous solution in the core.

[0252] Liposomes bear resemblance to cellular membranes and are contemplated for use in connection with the present invention as carriers for the peptide compositions. They are widely suitable as both water- and lipid-soluble substances can be entrapped, i.e. in the aqueous spaces and within the bilayer itself, respectively. It is possible that the drug-bearing liposomes may even be employed for site-specific delivery of active agents by selectively modifying the liposomal formulation.

[0253] In addition to the teachings of Couvreur et al. (1977; 1988), the following information may be utilized in generating liposomal formulations. Phospholipids can form a variety of structures other than liposomes when dispersed in water, depending on the molar ratio of lipid to water. At low ratios the liposome is the preferred structure. The physical characteristics of liposomes depend on pH, ionic strength and the presence of divalent cations. Liposomes can show low permeability to ionic and polar substances, but at elevated temperatures undergo a phase transition which markedly alters their permeability. The phase transition involves a change from a closely packed, ordered structure, known as the gel state, to a loosely packed, less-ordered structure, known as the fluid state. This occurs at a characteristic phase-transition temperature and results in an increase in permeability to ions, sugars and drugs.

[0254] In addition to temperature, exposure to proteins can alter the permeability of liposomes. Certain soluble proteins, such as cytochrome c, bind, deform and penetrate the bilayer, thereby causing changes in permeability. Cholesterol inhibits this penetration of proteins, apparently by packing the phospholipids more tightly. It is contemplated that the most useful liposome formations for antibiotic and inhibitor delivery will contain cholesterol.

[0255] The ability to trap solutes varies between different types of liposomes. For example, MLVs are moderately efficient at trapping solutes, but SUVs are extremely inefficient. SUVs offer the advantage of homogeneity and reproducibility in size distribution, however, and a compromise between size and trapping efficiency is offered by large unilamellar vesicles (LUVs). These are prepared by ether evaporation and are three to four times more efficient at solute entrapment than MLVs.

[0256] In addition to liposome characteristics, an important determinant in entrapping compounds is the physicochemical properties of the compound itself. Polar compounds are trapped in the aqueous spaces and nonpolar compounds bind to the lipid bilayer of the vesicle. Polar compounds are released through permeation or when the bilayer is broken, but nonpolar compounds remain affiliated with the bilayer unless it is disrupted by temperature or exposure to lipoproteins. Both types show maximum efflux rates at the phase transition temperature.

[0257] Liposomes interact with cells via four different mechanisms: Endocytosis by phagocytic cells of the reticuloendothelial system such as macrophages and neutrophils; adsorption to the cell surface, either by nonspecific weak hydrophobic or electrostatic forces, or by specific interactions with cell-surface components; fusion with the plasma cell membrane by insertion of the lipid bilayer of the liposome into the plasma membrane, with simultaneous release of liposomal contents into the cytoplasm; and by transfer of liposomal lipids to cellular or subcellular membranes, or vice versa, without any association of the liposome contents. It often is difficult to determine which mechanism is operative and more than one may operate at the same time.

[0258] The fate and disposition of intravenously injected liposomes depend on their physical properties, such as size, fluidity, and surface charge. They may persist in tissues for h or days, depending on their composition, and half lives in the blood range from min to several h. Larger liposomes, such as MLVs and LUVs, are taken up rapidly by phagocytic cells of the reticuloendothelial system, but physiology of the circulatory system restrains the exit of such large species at most sites. They can exit only in places where large openings or pores exist in the capillary endothelium, such as the sinusoids of the liver or spleen. Thus, these organs are the predominate site of uptake. On the other hand, SUVs show a broader tissue distribution but still are sequestered highly in the liver and spleen. In general, this in vivo behavior limits the potential targeting of liposomes to only those organs and tissues accessible to their large size. These include the blood, liver, spleen, bone marrow, and lymphoid organs.

[0259] Targeting is generally not a limitation in terms of the present invention. However, should specific targeting be desired, methods are available for this to be accomplished. Antibodies may be used to bind to the liposome surface and to direct the antibody and its drug contents to specific antigenic receptors located on a particular cell-type surface. Carbohydrate determinants (glycoprotein or glycolipid cell-surface components that play a role in cell-cell recognition, interaction and adhesion) may also be used as recognition sites as they have potential in directing liposomes to particular cell types. Mostly, it is contemplated that intravenous injection of liposomal preparations would be used, but other routes of administration are also conceivable.

[0260] Alternatively, the invention provides for pharmaceutically-acceptable nanocapsule formulations of the compositions of the present invention. Nanocapsules can generally entrap compounds in a stable and reproducible way (Henry-Michelland et al., 1987; Quintanar-Guerrero et al., 1998; Douglas et al., 1987). To avoid side effects due to intracellular polymeric overloading, such ultrafine particles (sized around 0.1 μm) should be designed using polymers able to be degraded in vivo. Biodegradable polyalkyl-cyanoacrylate nanoparticles that meet these requirements are contemplated for use in the present invention. Such particles may be are easily made, as described (Couvreur et al., 1980; 1988; zur Muhlen et al., 1998; Zambaux et al. 1998; Pinto-Alphandry et al., 1995 and U.S. Pat. No. 5,145,684, specifically incorporated herein by reference in its entirety).

[0261] Vaccines

[0262] In certain preferred embodiments, pharmaceutical compositions comprising vaccines are provided. The vaccines will generally comprise one or more pharmaceutical compositions, such as those discussed above, in combination with an immunostimulant. An immunostimulant may be any substance that enhances or potentiates an immune response (antibody and/or cell-mediated) to an exogenous antigen. Examples of immunostimulants include adjuvants, biodegradable microspheres (e.g., polylactic galactide) and liposomes (into which the compound is incorporated; see e.g., Fullerton, U.S. Pat. No. 4,235,877). Vaccine preparation is generally described in, for example, M. F. Powell and M. J. Newman, eds., “Vaccine Design (the subunit and adjuvant approach),” Plenum Press (NY, 1995). Pharmaceutical compositions and vaccines within the scope of the present invention may also contain other compounds, which may be biologically active or inactive. For example, one or more immunogenic portions of other tumor antigens may be present, either incorporated into a fusion polypeptide or as a separate compound, within the composition or vaccine.

[0263] Illustrative vaccines may contain DNA encoding one or more of the polypeptides as described above, such that the polypeptide is generated in situ. As noted above, the DNA may be present within any of a variety of delivery systems known to those of ordinary skill in the art, including nucleic acid expression systems, bacteria and viral expression systems. Numerous gene delivery techniques are well known in the art, such as those described by Rolland, Crit. Rev. Therap. Drug Carrier Systems 15:143-198, 1998, and references cited therein. Appropriate nucleic acid expression systems contain the necessary DNA sequences for expression in the patient (such as a suitable promoter and terminating signal). Bacterial delivery systems involve the administration of a bacterium (such as Bacillus-Calmette-Guerrin) that expresses an immunogenic portion of the polypeptide on its cell surface or secretes such an epitope. In a preferred embodiment, the DNA may be introduced using a viral expression system (e.g., vaccinia or other pox virus, retrovirus, or adenovirus), which may involve the use of a non-pathogenic (defective), replication competent virus. Suitable systems are disclosed, for example, in Fisher-Hoch et al., Proc. Natl. Acad. Sci. USA 86:317-321, 1989; Flexner et al., Ann. N.Y. Acad. Sci. 569:86-103, 1989; Flexner et al., Vaccine 8:17-21, 1990; U.S. Patent Nos. 4,603,112, 4,769,330, and 5,017,487; WO 89/01973; U.S. Pat. No. 4,777,127; GB 2,200,651; EP 0,345,242; WO 91/02805; Berkner, Biotechniques 6:616-627, 1988; Rosenfeld et al., Science 252:431-434, 1991; Kolls et al., Proc. Natl. Acad. Sci. USA 91:215-219, 1994; Kass-Eisler et al., Proc. Natl. Acad. Sci. USA 90:11498-11502, 1993; Guzman et al., Circulation 88:2838-2848, 1993; and Guzman et al., Cir. Res. 73:1202-1207, 1993. Techniques for incorporating DNA into such expression systems are well known to those of ordinary skill in the art. The DNA may also be “naked,” as described, for example, in Ulmer et al., Science 259:1745-1749, 1993 and reviewed by Cohen, Science 259:1691-1692, 1993. The uptake of naked DNA may be increased by coating the DNA onto biodegradable beads, which are efficiently transported into the cells. It will be apparent that a vaccine may comprise both a polynucleotide and a polypeptide component. Such vaccines may provide for an enhanced immune response.

[0264] It will be apparent that a vaccine may contain pharmaceutically acceptable salts of the polynucleotides and polypeptides provided herein. Such salts may be prepared from pharmaceutically acceptable non-toxic bases, including organic bases (e.g., salts of primary, secondary and tertiary amines and basic amino acids) and inorganic bases (e.g., sodium, potassium, lithium, ammonium, calcium and magnesium salts).

[0265] While any suitable carrier known to those of ordinary skill in the art may be employed in the vaccine compositions of this invention, the type of carrier will vary depending on the mode of administration. Compositions of the present invention may be formulated for any appropriate manner of administration, including for example, topical, oral, nasal, intravenous, intracranial, intraperitoneal, subcutaneous or intramuscular administration. For parenteral administration, such as subcutaneous injection, the carrier preferably comprises water, saline, alcohol, a fat, a wax or a buffer. For oral administration, any of the above carriers or a solid carrier, such as mannitol, lactose, starch, magnesium stearate, sodium saccharine, talcum, cellulose, glucose, sucrose, and magnesium carbonate, may be employed. Biodegradable microspheres (e.g., polylactate polyglycolate) may also be employed as carriers for the pharmaceutical compositions of this invention. Suitable biodegradable microspheres are disclosed, for example, in U.S. Pat. Nos. 4,897,268; 5,075,109; 5,928,647; 5,811,128; 5,820,883; 5,853,763; 5,814,344 and 5,942,252. One may also employ a carrier comprising the particulate-protein complexes described in U.S. Pat. No. 5,928,647, which are capable of inducing a class I-restricted cytotoxic T lymphocyte responses in a host.

[0266] Such compositions may also comprise buffers (e.g., neutral buffered saline or phosphate buffered saline), carbohydrates (e.g., glucose, mannose, sucrose or dextrans), mannitol, proteins, polypeptides or amino acids such as glycine, antioxidants, bacteriostats, chelating agents such as EDTA or glutathione, adjuvants (e.g., aluminum hydroxide), solutes that render the formulation isotonic, hypotonic or weakly hypertonic with the blood of a recipient, suspending agents, thickening agents and/or preservatives. Alternatively, compositions of the present invention may be formulated as a lyophilizate. Compounds may also be encapsulated within liposomes using well known technology.

[0267] Any of a variety of immunostimulants may be employed in the vaccines of this invention. For example, an adjuvant may be included. Most adjuvants contain a substance designed to protect the antigen from rapid catabolism, such as aluminum hydroxide or mineral oil, and a stimulator of immune responses, such as lipid A, Bortadella pertussis or Mycobacterium tuberculosis derived proteins. Suitable adjuvants are commercially available as, for example, Freund's Incomplete Adjuvant and Complete Adjuvant (Difco Laboratories, Detroit, Mich.); Merck Adjuvant 65 (Merck and Company, Inc., Rahway, N.J.); AS-2 (SmithKline Beecham, Philadelphia, Pa.); aluminum salts such as aluminum hydroxide gel (alum) or aluminum phosphate; salts of calcium, iron or zinc; an insoluble suspension of acylated tyrosine; acylated sugars; cationically or anionically derivatized polysaccharides; polyphosphazenes; biodegradable microspheres; monophosphoryl lipid A and quil A. Cytokines, such as GM-CSF or interleukin-2,-7, or -12, may also be used as adjuvants.

[0268] Within the vaccines provided herein, the adjuvant composition is preferably designed to induce an immune response predominantly of the Th1 type. High levels of Th1-type cytokines (e.g., IFN-γ, TNFα, IL-2 and IL-12) tend to favor the induction of cell mediated immune responses to an administered antigen. In contrast, high levels of Th2-type cytokines (e.g., IL-4, IL-5, IL-6 and IL-10) tend to favor the induction of humoral immune responses. Following application of a vaccine as provided herein, a patient will support an immune response that includes Th1- and Th2-type responses. Within a preferred embodiment, in which a response is predominantly Th1-type, the level of Th1-type cytokines will increase to a greater extent than the level of Th2-type cytokines. The levels of these cytokines may be readily assessed using standard assays. For a review of the families of cytokines, see Mosmann and Coffman, Ann. Rev. Immunol 7:145-173, 1989.

[0269] Preferred adjuvants for use in eliciting a predominantly Th1-type response include, for example, a combination of monophosphoryl lipid A, preferably 3-de-O-acylated monophosphoryl lipid A (3D-MPL), together with an aluminum salt. MPL adjuvants are available from Corixa Corporation (Seattle, Wash.; see U.S. Pat. Nos. 4,436,727; 4,877,611; 4,866,034 and 4,912,094). CpG-containing oligonucleotides (in which the CpG dinucleotide is unmethylated) also induce a predominantly Th1 response. Such oligonucleotides are well known and are described, for example, in WO 96/02555, WO 99/33488 and U.S. Patent Nos. 6,008,200 and 5,856,462. Immunostimulatory DNA sequences are also described, for example, by Sato et al., Science 273:352, 1996. Another preferred adjuvant is a saponin, preferably QS21 (Aquila Biopharmaceuticals Inc., Framingham, Mass.), which may be used alone or in combination with other adjuvants. For example, an enhanced system involves the combination of a monophosphoryl lipid A and saponin derivative, such as the combination of QS21 and 3D-MPL as described in WO 94/00153, or a less reactogenic composition where the QS21 is quenched with cholesterol, as described in WO 96/33739. Other preferred formulations comprise an oil-in-water emulsion and tocopherol. A particularly potent adjuvant formulation involving QS21, 3D-MPL and tocopherol in an oil-in-water emulsion is described in WO 95/17210.

[0270] Other preferred adjuvants include Montanide ISA 720 (Seppic, France), SAF (Chiron, Calif., United States), ISCOMS (CSL), MF-59 (Chiron), the SBAS series of adjuvants (e.g., SBAS-2 or SBAS-4, available from SmithKline Beecham, Rixensart, Belgium), Detox (Corixa, Hamilton, Mont.), RC-529 (Corixa, Hamilton, Mont.) and other aminoalkyl glucosaminide 4-phosphates (AGPs), such as those described in pending U.S. patent application Ser. Nos. 08/853,826 and 09/074,720, the disclosures of which are incorporated herein by reference in their entireties.

[0271] Any vaccine provided herein may be prepared using well known methods that result in a combination of antigen, immune response enhancer and a suitable carrier or excipient. The compositions described herein may be administered as part of a sustained release formulation (i.e., a formulation such as a capsule, sponge or gel (composed of polysaccharides, for example) that effects a slow release of compound following administration). Such formulations may generally be prepared using well known technology (see, e.g., Coombes et al., Vaccine 14:1429-1438, 1996) and administered by, for example, oral, rectal or subcutaneous implantation, or by implantation at the desired target site. Sustained-release formulations may contain a polypeptide, polynucleotide or antibody dispersed in a carrier matrix and/or contained within a reservoir surrounded by a rate controlling membrane.

[0272] Carriers for use within such formulations are biocompatible, and may also be biodegradable; preferably the formulation provides a relatively constant level of active component release. Such carriers include microparticles of poly(lactide-co-glycolide), polyacrylate, latex, starch, cellulose, dextran and the like. Other delayed-release carriers include supramolecular biovectors, which comprise a non-liquid hydrophilic core (e.g., a cross-linked polysaccharide or oligosaccharide) and, optionally, an external layer comprising an amphiphilic compound, such as a phospholipid (see e.g., U.S. Patent No. 5,151,254 and PCT applications WO 94/20078, WO/94/23701 and WO 96/06638). The amount of active compound contained within a sustained release formulation depends upon the site of implantation, the rate and expected duration of release and the nature of the condition to be treated or prevented.

[0273] Any of a variety of delivery vehicles may be employed within pharmaceutical compositions and vaccines to facilitate production of an antigen-specific immune response that targets tumor cells. Delivery vehicles include antigen presenting cells (APCs), such as dendritic cells, macrophages, B cells, monocytes and other cells that may be engineered to be efficient APCs. Such cells may, but need not, be genetically modified to increase the capacity for presenting the antigen, to improve activation and/or maintenance of the T cell response, to have anti-tumor effects per se and/or to be immunologically compatible with the receiver (i.e., matched HLA haplotype). APCs may generally be isolated from any of a variety of biological fluids and organs, including tumor and peritumoral tissues, and may be autologous, allogeneic, syngeneic or xenogeneic cells.

[0274] Certain preferred embodiments of the present invention use dendritic cells or progenitors thereof as antigen-presenting cells. Dendritic cells are highly potent APCs (Banchereau and Steinman, Nature 392:245-251, 1998) and have been shown to be effective as a physiological adjuvant for eliciting prophylactic or therapeutic antitumor immunity (see Timmerman and Levy, Ann. Rev. Med. 50:507-529, 1999). In general, dendritic cells may be identified based on their typical shape (stellate in situ, with marked cytoplasmic processes (dendrites) visible in vitro), their ability to take up, process and present antigens with high efficiency and their ability to activate naive T cell responses. Dendritic cells may, of course, be engineered to express specific cell-surface receptors or ligands that are not commonly found on dendritic cells in vivo or ex vivo, and such modified dendritic cells are contemplated by the present invention. As an alternative to dendritic cells, secreted vesicles antigen-loaded dendritic cells (called exosomes) may be used within a vaccine (see Zitvogel et al., Nature Med. 4:594-600, 1998).

[0275] Dendritic cells and progenitors may be obtained from peripheral blood, bone marrow, tumor-infiltrating cells, peritumoral tissues-infiltrating cells, lymph nodes, spleen, skin, umbilical cord blood or any other suitable tissue or fluid. For example, dendritic cells may be differentiated ex vivo by adding a combination of cytokines such as GM-CSF, IL-4, IL-13 and/or TNFα to cultures of monocytes harvested from peripheral blood. Alternatively, CD34 positive cells harvested from peripheral blood, umbilical cord blood or bone marrow may be differentiated into dendritic cells by adding to the culture medium combinations of GM-CSF, IL-3, TNFα, CD40 ligand, LPS, flt3 ligand and/or other compound(s) that induce differentiation, maturation and proliferation of dendritic cells.

[0276] Dendritic cells are conveniently categorized as “immature” and “mature” cells, which allows a simple way to discriminate between two well characterized phenotypes. However, this nomenclature should not be construed to exclude all possible intermediate stages of differentiation. Immature dendritic cells are characterized as APC with a high capacity for antigen uptake and processing, which correlates with the high expression of Fcγ receptor and mannose receptor. The mature phenotype is typically characterized by a lower expression of these markers, but a high expression of cell surface molecules responsible for T cell activation such as class I and class II MHC, adhesion molecules (e.g., CD54 and CD11) and costimulatory molecules (e.g., CD40, CD80, CD86 and 4-1BB).

[0277] APCs may generally be transfected with a polynucleotide encoding an ovarian tumor protein (or portion or other variant thereof) such that the ovarian tumor polypeptide, or an immunogenic portion thereof, is expressed on the cell surface. Such transfection may take place ex vivo, and a composition or vaccine comprising such transfected cells may then be used for therapeutic purposes, as described herein. Alternatively, a gene delivery vehicle that targets a dendritic or other antigen presenting cell may be administered to a patient, resulting in transfection that occurs in vivo. In vivo and ex vivo transfection of dendritic cells, for example, may generally be performed using any methods known in the art, such as those described in WO 97/24447, or the gene gun approach described by Mahvi et al., Immunology and cell Biology 75:456-460, 1997. Antigen loading of dendritic cells may be achieved by incubating dendritic cells or progenitor cells with the ovarian tumor polypeptide, DNA (naked or within a plasmid vector) or RNA; or with antigen-expressing recombinant bacterium or viruses (e.g., vaccinia, fowlpox, adenovirus or lentivirus vectors). Prior to loading, the polypeptide may be covalently conjugated to an immunological partner that provides T cell help (e.g., a carrier molecule). Alternatively, a dendritic cell may be pulsed with a non-conjugated immunological partner, separately or in the presence of the polypeptide.

[0278] Vaccines and pharmaceutical compositions may be presented in unit-dose or multi-dose containers, such as sealed ampoules or vials. Such containers are preferably hermetically sealed to preserve sterility of the formulation until use. In general, formulations may be stored as suspensions, solutions or emulsions in oily or aqueous vehicles. Alternatively, a vaccine or pharmaceutical composition may be stored in a freeze-dried condition requiring only the addition of a sterile liquid carrier immediately prior to use.

[0279] Cancer Therapy

[0280] In further aspects of the present invention, the compositions described herein may be used for immunotherapy of cancer, such as ovarian cancer. Within such methods, pharmaceutical compositions and vaccines are typically administered to a patient. As used herein, a “patient” refers to any warm-blooded animal, preferably a human. A patient may or may not be afflicted with cancer. Accordingly, the above pharmaceutical compositions and vaccines may be used to prevent the development of a cancer or to treat a patient afflicted with a cancer. A cancer may be diagnosed using criteria generally accepted in the art, including the presence of a malignant tumor. Pharmaceutical compositions and vaccines may be administered either prior to or following surgical removal of primary tumors and/or treatment such as administration of radiotherapy or conventional chemotherapeutic drugs. Administration may be by any suitable method, including administration by intravenous, intraperitoneal, intramuscular, subcutaneous, intranasal, intradermal, anal, vaginal, topical and oral routes.

[0281] Within certain embodiments, immunotherapy may be active immunotherapy, in which treatment relies on the in vivo stimulation of the endogenous host immune system to react against tumors with the administration of immune response-modifying agents (such as polypeptides and polynucleotides as provided herein).

[0282] Within other embodiments, immunotherapy may be passive immunotherapy, in which treatment involves the delivery of agents with established tumor-immune reactivity (such as effector cells or antibodies) that can directly or indirectly mediate antitumor effects and does not necessarily depend on an intact host immune system. Examples of effector cells include T cells as discussed above, T lymphocytes (such as CD8⁺ cytotoxic T lymphocytes and CD4⁺ T-helper tumor-infiltrating lymphocytes), killer cells (such as Natural Killer cells and lymphokine-activated killer cells), B cells and antigen-presenting cells (such as dendritic cells and macrophages) expressing a polypeptide provided herein. T cell receptors and antibody receptors specific for the polypeptides recited herein may be cloned, expressed and transferred into other vectors or effector cells for adoptive immunotherapy. The polypeptides provided herein may also be used to generate antibodies or anti-idiotypic antibodies (as described above and in U.S. Patent No. 4,918,164) for passive immunotherapy.

[0283] Effector cells may generally be obtained in sufficient quantities for adoptive immunotherapy by growth in vitro, as described herein. Culture conditions for expanding single antigen-specific effector cells to several billion in number with retention of antigen recognition in vivo are well known in the art. Such in vitro culture conditions typically use intermittent stimulation with antigen, often in the presence of cytokines (such as IL-2) and non-dividing feeder cells. As noted above, immunoreactive polypeptides as provided herein may be used to rapidly expand antigen-specific T cell cultures in order to generate a sufficient number of cells for immunotherapy. In particular, antigen-presenting cells, such as dendritic, macrophage, monocyte, fibroblast and/or B cells, may be pulsed with immunoreactive polypeptides or transfected with one or more polynucleotides using standard techniques well known in the art. For example, antigen-presenting cells can be transfected with a polynucleotide having a promoter appropriate for increasing expression in a recombinant virus or other expression system. Cultured effector cells for use in therapy must be able to grow and distribute widely, and to survive long term in vivo. Studies have shown that cultured effector cells can be induced to grow in vivo and to survive long term in substantial numbers by repeated stimulation with antigen supplemented with IL-2 (see, for example, Cheever et al., Immunological Reviews 157:177, 1997).

[0284] Alternatively, a vector expressing a polypeptide recited herein may be introduced into antigen presenting cells taken from a patient and clonally propagated ex vivo for transplant back into the same patient. Transfected cells may be reintroduced into the patient using any means known in the art, preferably in sterile form by intravenous, intracavitary, intraperitoneal or intratumor administration.

[0285] Routes and frequency of administration of the therapeutic compositions described herein, as well as dosage, will vary from individual to individual, and may be readily established using standard techniques. In general, the pharmaceutical compositions and vaccines may be administered by injection (e.g., intracutaneous, intramuscular, intravenous or subcutaneous), intranasally (e.g., by aspiration) or orally. Preferably, between 1 and 10 doses may be administered over a 52 week period. Preferably, 6 doses are administered, at intervals of 1 month, and booster vaccinations may be given periodically thereafter. Alternate protocols may be appropriate for individual patients. A suitable dose is an amount of a compound that, when administered as described above, is capable of promoting an anti-tumor immune response, and is at least 10-50% above the basal (i.e., untreated) level. Such response can be monitored by measuring the anti-tumor antibodies in a patient or by vaccine-dependent generation of cytolytic effector cells capable of killing the patient's tumor cells in vitro. Such vaccines should also be capable of causing an immune response that leads to an improved clinical outcome (e.g., more frequent remissions, complete or partial or longer disease-free survival) in vaccinated patients as compared to non-vaccinated patients. In general, for pharmaceutical compositions and vaccines comprising one or more polypeptides, the amount of each polypeptide present in a dose ranges from about 25 μg to 5 mg per kg of host. Suitable dose sizes will vary with the size of the patient, but will typically range from about 0.1 mL to about 5 mL.

[0286] In general, an appropriate dosage and treatment regimen provides the active compound(s) in an amount sufficient to provide therapeutic and/or prophylactic benefit. Such a response can be monitored by establishing an improved clinical outcome (e.g., more frequent remissions, complete or partial, or longer disease-free survival) in treated patients as compared to non-treated patients. Increases in preexisting immune responses to an ovarian tumor protein generally correlate with an improved clinical outcome. Such immune responses may generally be evaluated using standard proliferation, cytotoxicity or cytokine assays, which may be performed using samples obtained from a patient before and after treatment.

[0287] Cancer Detection and Diagnosis

[0288] In general, a cancer may be detected in a patient based on the presence of one or more ovarian tumor proteins and/or polynucleotides encoding such proteins in a biological sample (for example, blood, sera, sputum urine and/or tumor biopsies) obtained from the patient. In other words, such proteins may be used as markers to indicate the presence or absence of a cancer such as ovarian cancer. In addition, such proteins may be useful for the detection of other cancers. The binding agents provided herein generally permit detection of the level of antigen that binds to the agent in the biological sample. Polynucleotide primers and probes may be used to detect the level of mRNA encoding a tumor protein, which is also indicative of the presence or absence of a cancer. In general, an ovarian tumor sequence should be present at a level that is at least three fold higher in tumor tissue than in normal tissue There are a variety of assay formats known to those of ordinary skill in the art for using a binding agent to detect polypeptide markers in a sample. See, e.g., Harlow and Lane, Antibodies: A Laboratory Manual, Cold Spring Harbor Laboratory, 1988. In general, the presence or absence of a cancer in a patient may be determined by (a) contacting a biological sample obtained from a patient with a binding agent; (b) detecting in the sample a level of polypeptide that binds to the binding agent; and (c) comparing the level of polypeptide with a predetermined cut-off value.

[0289] In a preferred embodiment, the assay involves the use of binding agent immobilized on a solid support to bind to and remove the polypeptide from the remainder of the sample. The bound polypeptide may then be detected using a detection reagent that contains a reporter group and specifically binds to the binding agent/polypeptide complex. Such detection reagents may comprise, for example, a binding agent that specifically binds to the polypeptide or an antibody or other agent that specifically binds to the binding agent, such as an anti-immunoglobulin, protein G, protein A or a lectin. Alternatively, a competitive assay may be utilized, in which a polypeptide is labeled with a reporter group and allowed to bind to the immobilized binding agent after incubation of the binding agent with the sample. The extent to which components of the sample inhibit the binding of the labeled polypeptide to the binding agent is indicative of the reactivity of the sample with the immobilized binding agent. Suitable polypeptides for use within such assays include full length ovarian tumor proteins and portions thereof to which the binding agent binds, as described above.

[0290] The solid support may be any material known to those of ordinary skill in the art to which the tumor protein may be attached. For example, the solid support may be a test well in a microtiter plate or a nitrocellulose or other suitable membrane. Alternatively, the support may be a bead or disc, such as glass, fiberglass, latex or a plastic material such as polystyrene or polyvinylchloride. The support may also be a magnetic particle or a fiber optic sensor, such as those disclosed, for example, in U.S. Pat. No. 5,359,681. The binding agent may be immobilized on the solid support using a variety of techniques known to those of skill in the art, which are amply described in the patent and scientific literature. In the context of the present invention, the term “immobilization” refers to both noncovalent association, such as adsorption, and covalent attachment (which may be a direct linkage between the agent and functional groups on the support or may be a linkage by way of a cross-linking agent). Immobilization by adsorption to a well in a microtiter plate or to a membrane is preferred. In such cases, adsorption may be achieved by contacting the binding agent, in a suitable buffer, with the solid support for a suitable amount of time. The contact time varies with temperature, but is typically between about 1 hour and about 1 day. In general, contacting a well of a plastic microtiter plate (such as polystyrene or polyvinylchloride) with an amount of binding agent ranging from about 10 ng to about 10 μg, and preferably about 100 ng to about 1 μg, is sufficient to immobilize an adequate amount of binding agent.

[0291] Covalent attachment of binding agent to a solid support may generally be achieved by first reacting the support with a bifunctional reagent that will react with both the support and a functional group, such as a hydroxyl or amino group, on the binding agent. For example, the binding agent may be covalently attached to supports having an appropriate polymer coating using benzoquinone or by condensation of an aldehyde group on the support with an amine and an active hydrogen on the binding partner (see, e.g., Pierce Immunotechnology Catalog and Handbook, 1991, at A12-A13).

[0292] In certain embodiments, the assay is a two-antibody sandwich assay. This assay may be performed by first contacting an antibody that has been immobilized on a solid support, commonly the well of a microtiter plate, with the sample, such that polypeptides within the sample are allowed to bind to the immobilized antibody. Unbound sample is then removed from the immobilized polypeptide-antibody complexes and a detection reagent (preferably a second antibody capable of binding to a different site on the polypeptide) containing a reporter group is added. The amount of detection reagent that remains bound to the solid support is then determined using a method appropriate for the specific reporter group.

[0293] More specifically, once the antibody is immobilized on the support as described above, the remaining protein binding sites on the support are typically blocked. Any suitable blocking agent known to those of ordinary skill in the art, such as bovine serum albumin or Tween 20™ (Sigma Chemical Co., St. Louis, Mo.). The immobilized antibody is then incubated with the sample, and polypeptide is allowed to bind to the antibody. The sample may be diluted with a suitable diluent, such as phosphate-buffered saline (PBS) prior to incubation. In general, an appropriate contact time (i.e., incubation time) is a period of time that is sufficient to detect the presence of polypeptide within a sample obtained from an individual with ovarian cancer. Preferably, the contact time is sufficient to achieve a level of binding that is at least about 95% of that achieved at equilibrium between bound and unbound polypeptide. Those of ordinary skill in the art will recognize that the time necessary to achieve equilibrium may be readily determined by assaying the level of binding that occurs over a period of time. At room temperature, an incubation time of about 30 minutes is generally sufficient.

[0294] Unbound sample may then be removed by washing the solid support with an appropriate buffer, such as PBS containing 0.1% Tween 20™. The second antibody, which contains a reporter group, may then be added to the solid support. Preferred reporter groups include those groups recited above.

[0295] The detection reagent is then incubated with the immobilized antibody-polypeptide complex for an amount of time sufficient to detect the bound polypeptide. An appropriate amount of time may generally be determined by assaying the level of binding that occurs over a period of time. Unbound detection reagent is then removed and bound detection reagent is detected using the reporter group. The method employed for detecting the reporter group depends upon the nature of the reporter group. For radioactive groups, scintillation counting or autoradiographic methods are generally appropriate. Spectroscopic methods may be used to detect dyes, luminescent groups and fluorescent groups. Biotin may be detected using avidin, coupled to a different reporter group (commonly a radioactive or fluorescent group or an enzyme). Enzyme reporter groups may generally be detected by the addition of substrate (generally for a specific period of time), followed by spectroscopic or other analysis of the reaction products.

[0296] To determine the presence or absence of a cancer, such as ovarian cancer, the signal detected from the reporter group that remains bound to the solid support is generally compared to a signal that corresponds to a predetermined cut-off value. In one preferred embodiment, the cut-off value for the detection of a cancer is the average mean signal obtained when the immobilized antibody is incubated with samples from patients without the cancer. In general, a sample generating a signal that is three standard deviations above the predetermined cut-off value is considered positive for the cancer. In an alternate preferred embodiment, the cut-off value is determined using a Receiver Operator Curve, according to the method of Sackett et al., Clinical Epidemiology: A Basic Science for Clinical Medicine, Little Brown and Co., 1985, p. 10⁶-7. Briefly, in this embodiment, the cut-off value may be determined from a plot of pairs of true positive rates (i.e., sensitivity) and false positive rates (100%-specificity) that correspond to each possible cut-off value for the diagnostic test result. The cut-off value on the plot that is the closest to the upper left-hand corner (i.e., the value that encloses the largest area) is the most accurate cut-off value, and a sample generating a signal that is higher than the cut-off value determined by this method may be considered positive. Alternatively, the cut-off value may be shifted to the left along the plot, to minimize the false positive rate, or to the right, to minimize the false negative rate. In general, a sample generating a signal that is higher than the cut-off value determined by this method is considered positive for a cancer.

[0297] In a related embodiment, the assay is performed in a flow-through or strip test format, wherein the binding agent is immobilized on a membrane, such as nitrocellulose. In the flow-through test, polypeptides within the sample bind to the immobilized binding agent as the sample passes through the membrane. A second, labeled binding agent then binds to the binding agent-polypeptide complex as a solution containing the second binding agent flows through the membrane. The detection of bound second binding agent may then be performed as described above. In the strip test format, one end of the membrane to which binding agent is bound is immersed in a solution containing the sample. The sample migrates along the membrane through a region containing second binding agent and to the area of immobilized binding agent. Concentration of second binding agent at the area of immobilized antibody indicates the presence of a cancer. Typically, the concentration of second binding agent at that site generates a pattern, such as a line, that can be read visually. The absence of such a pattern indicates a negative result. In general, the amount of binding agent immobilized on the membrane is selected to generate a visually discernible pattern when the biological sample contains a level of polypeptide that would be sufficient to generate a positive signal in the two-antibody sandwich assay, in the format discussed above. Preferred binding agents for use in such assays are antibodies and antigen-binding fragments thereof. Preferably, the amount of antibody immobilized on the membrane ranges from about 25 ng to about 1 μg, and more preferably from about 50 ng to about 500 ng. Such tests can typically be performed with a very small amount of biological sample.

[0298] Of course, numerous other assay protocols exist that are suitable for use with the tumor proteins or binding agents of the present invention. The above descriptions are intended to be exemplary only. For example, it will be apparent to those of ordinary skill in the art that the above protocols may be readily modified to use ovarian tumor polypeptides to detect antibodies that bind to such polypeptides in a biological sample. The detection of such ovarian tumor protein specific antibodies may correlate with the presence of a cancer.

[0299] A cancer may also, or alternatively, be detected based on the presence of T cells that specifically react with an ovarian tumor protein in a biological sample. Within certain methods, a biological sample comprising CD4⁺ and/or CD8⁺ T cells isolated from a patient is incubated with an ovarian tumor polypeptide, a polynucleotide encoding such a polypeptide and/or an APC that expresses at least an immunogenic portion of such a polypeptide, and the presence or absence of specific activation of the T cells is detected. Suitable biological samples include, but are not limited to, isolated T cells. For example, T cells may be isolated from a patient by routine techniques (such as by Ficoll/Hypaque density gradient centrifugation of peripheral blood lymphocytes). T cells may be incubated in vitro for 2-9 days (typically 4 days) at 37° C. with polypeptide (e.g., 5-25 μg/ml). It may be desirable to incubate another aliquot of a T cell sample in the absence of an ovarian tumor polypeptide to serve as a control. For CD4⁺ T cells, activation is preferably detected by evaluating proliferation of the T cells. For CD8⁺0 T cells, activation is preferably detected by evaluating cytolytic activity. A level of proliferation that is at least two fold greater and/or a level of cytolytic activity that is at least 20% greater than in disease-free patients indicates the presence of a cancer in the patient.

[0300] As noted above, a cancer may also, or alternatively, be detected based on the level of mRNA encoding an ovarian tumor protein in a biological sample. For example, at least two oligonucleotide primers may be employed in a polymerase chain reaction (PCR) based assay to amplify a portion of an ovarian tumor cDNA derived from a biological sample, wherein at least one of the oligonucleotide primers is specific for (i.e., hybridizes to) a polynucleotide encoding the ovarian tumor protein. The amplified cDNA is then separated and detected using techniques well known in the art, such as gel electrophoresis. Similarly, oligonucleotide probes that specifically hybridize to a polynucleotide encoding an ovarian tumor protein may be used in a hybridization assay to detect the presence of polynucleotide encoding the tumor protein in a biological sample.

[0301] To permit hybridization under assay conditions, oligonucleotide primers and probes should comprise an oligonucleotide sequence that has at least about 60%, preferably at least about 75% and more preferably at least about 90%, identity to a portion of a polynucleotide encoding an ovarian tumor protein that is at least 10 nucleotides, and preferably at least 20 nucleotides, in length. Preferably, oligonucleotide primers and/or probes hybridize to a polynucleotide encoding a polypeptide described herein under moderately stringent conditions, as defined above. Oligonucleotide primers and/or probes which may be usefully employed in the diagnostic methods described herein preferably are at least 10-40 nucleotides in length. In a preferred embodiment, the oligonucleotide primers comprise at least 10 contiguous nucleotides, more preferably at least 15 contiguous nucleotides, of a DNA molecule having a sequence recited in SEQ ID NOs:1-1730. Techniques for both PCR based assays and hybridization assays are well known in the art (see, for example, Mullis et al., Cold Spring Harbor Symp. Quant. Biol., 51:263, 1987; Erlich ed., PCR Technology, Stockton Press, NY, 1989).

[0302] One preferred assay employs RT-PCR, in which PCR is applied in conjunction with reverse transcription. Typically, RNA is extracted from a biological sample, such as biopsy tissue, and is reverse transcribed to produce cDNA molecules. PCR amplification using at least one specific primer generates a cDNA molecule, which may be separated and visualized using, for example, gel electrophoresis. Amplification may be performed on biological samples taken from a test patient and from an individual who is not afflicted with a cancer. The amplification reaction may be performed on several dilutions of cDNA spanning two orders of magnitude. A two-fold or greater increase in expression in several dilutions of the test patient sample as compared to the same dilutions of the non-cancerous sample is typically considered positive.

[0303] In another embodiment, the compositions described herein may be used as markers for the progression of cancer. In this embodiment, assays as described above for the diagnosis of a cancer may be performed over time, and the change in the level of reactive polypeptide(s) or polynucleotide(s) evaluated. For example, the assays may be performed every 24-72 hours for a period of 6 months to 1 year, and thereafter performed as needed. In general, a cancer is progressing in those patients in whom the level of polypeptide or polynucleotide detected increases over time. In contrast, the cancer is not progressing when the level of reactive polypeptide or polynucleotide either remains constant or decreases with time.

[0304] Certain in vivo diagnostic assays may be performed directly on a tumor. One such assay involves contacting tumor cells with a binding agent. The bound binding agent may then be detected directly or indirectly via a reporter group. Such binding agents may also be used in histological applications. Alternatively, polynucleotide probes may be used within such applications.

[0305] As noted above, to improve sensitivity, multiple ovarian tumor protein markers may be assayed within a given sample. It will be apparent that binding agents specific for different proteins provided herein may be combined within a single assay. Further, multiple primers or probes may be used concurrently. The selection of tumor protein markers may be based on routine experiments to determine combinations that results in optimal sensitivity. In addition, or alternatively, assays for tumor proteins provided herein may be combined with assays for other known tumor antigens.

[0306] Diagnostic Kits

[0307] The present invention further provides kits for use within any of the above diagnostic methods. Such kits typically comprise two or more components necessary for performing a diagnostic assay. Components may be compounds, reagents, containers and/or equipment. For example, one container within a kit may contain a monoclonal antibody or fragment thereof that specifically binds to an ovarian tumor protein. Such antibodies or fragments may be provided attached to a support material, as described above. One or more additional containers may enclose elements, such as reagents or buffers, to be used in the assay. Such kits may also, or alternatively, contain a detection reagent as described above that contains a reporter group suitable for direct or indirect detection of antibody binding.

[0308] Alternatively, a kit may be designed to detect the level of mRNA encoding an ovarian tumor protein in a biological sample. Such kits generally comprise at least one oligonucleotide probe or primer, as described above, that hybridizes to a polynucleotide encoding an ovarian tumor protein. Such an oligonucleotide may be used, for example, within a PCR or hybridization assay. Additional components that may be present within such kits include a second oligonucleotide and/or a diagnostic reagent or container to facilitate the detection of a polynucleotide encoding an ovarian tumor protein.

[0309] The following Examples are offered by way of illustration and not by way of limitation.

### EXAMPLE 1

### Identification of Ovarian Tumor Protein cDNAs

[0310] This Example illustrates the identification of cDNA molecules encoding ovarian tumor proteins.

[0311] The polymerase chain reaction (PCR)-Select™ cDNA subtraction methodology of Clontech (Palo Alto, Calif.) was utilized to create libraries enriched for cDNAs that encode ovary tissue-specific antigens, ovary metastatic tumor-expressed antigens and primary ovary tumor-expressed antigens. See U.S. Pat. Nos. 5,565,340 and 5,759,822, incorporated herein by reference, for a description of the (PCR)-Select™ cDNA subtraction methodology. This methodology permits the selective amplification of differentially expressed genes such as those expressed in one cell type but poorly expressed, or absent altogether, in another cell type.

[0312] PolyA mRNA was prepared from (a) a pool of four ovary omentum metastases and (b) four ovary primary tumors (including an endometroid adenocarcinoma, a germ cell tumor, a papillary serous adenocarcinoma and a clear cell carcinoma). The resulting transcripts were independently subtracted with a set of transcripts from normal brain, pancreas, bone marrow, lung, heart, kidney, liver, and trachea. Following mRNA isolation, cDNA was synthesized and hybridization and PCR amplification reactions were performed in accordance with Clontech's user manual with the following modifications: (1) cDNA was digested with a mixture of restriction enzymes including MscI, PvuII, StuI and DraI instead of the enzyme, RsaI, recommended by Clontech and (2) the ratio of driver to tester cDNA in the hybridization steps was increased to 1:76 in order to increase the stringency of the subtraction. While these are the tumor and normal cell types and (PCR)-Select™ cDNA subtraction reaction conditions used to achieve the polynucleotides disclosed herein, it will be apparent to one skilled in the art that each of these parameters may be modified as required for the particular application contemplated. Thus, for example, the artisan will recognize that the choice of restriction enzymes for cDNA digestion and the ratios of tester and driver for the hybridization steps may be varied in order to influence the efficiency and complexity of the resulting set of subtracted sequences.

[0313] Using the PCR-Select cDNA Subtraction methodology, three ovary tumor PCR-subtracted libraries were constructed by ligating cDNAs into the pCR2.1-TOPO plasmid vector (Invitrogen; Carlsbad, Calif.). One library was constructed using a pool of four ovary metastatic omentum “tester” mRNAs (OvMS Library; Ovarian Metastatic Subtraction Library) and two libraries were constructed using a pool of primary ovary tumor “tester” mRNAs, including an endometroid adenocarcinoma, a germ cell tumor, a papillary serous adenocarcioma, and a clear cell carcinoma (PrOvS Library; Primary Ovarian Tumor Subtraction Library). The PROvS1 and PROvS2 libraries were constructed from different PCR amplified pools from the same initial subtraction. Eight normal tissues were represented in the “driver” mRNA pool, including brain, pancreas, bone marrow, lung, heart, kidney, liver and trachea.

[0314] To analyze the efficiency of the subtraction, housekeeping genes such as actin and GAPDH were PCR amplified from dilutions of subtracted as well as unsubtracted PCR samples. The complexity and redundancy of each library was characterized by sequencing 96 clones from each of the PCR subtraction libraries (OvMS, PROvS1 and PROvS2). These analyses revealed that the libraries were enriched for genes overexpressed in ovary tissue and ovary tumor samples.

[0315] Individual library members were isolated and the cDNA inserts were amplified by PCR. The inserts were purified and subjected to automated sequencing. Disclosed herein in SEQ ID NOs:1-1412 and 1509-1730 are the sequences of 1,634 cDNA clones isolated from the ovarian PCR-subtracted libraries.

### EXAMPLE 2

### Synthesis of Ovarian Tumor Specific Polypeptides

[0316] This Example illustrates a methodology for the preparation of ovarian tumor specific polypeptides according to the present invention.

[0317] Polypeptides may be synthesized on a Perkin Elmer/Applied Biosystems Division 430A peptide synthesizer using FMOC chemistry with HPTU (O-Benzotriazole-N,N,N′,N′-tetramethyluronium hexafluorophosphate) activation. A Gly-Cys-Gly sequence may be attached to the amino terminus of the peptide to provide a method of conjugation, binding to an immobilized surface, or labeling of the peptide. Cleavage of the peptides from the solid support may be carried out using the following cleavage mixture: trifluoroacetic acid:ethanedithiol:thioanisole:water:phenol (40:1:2:2:3). After cleaving for 2 hours, the peptides may be precipitated in cold methyl-t-butyl-ether. The peptide pellets may then be dissolved in water containing 0.1% trifluoroacetic acid (TFA) and lyophilized prior to purification by C18 reverse phase HPLC. A gradient of 0%-60% acetonitrile (containing 0. 1% TFA) in water (containing 0. 1% TFA) may be used to elute the peptides. Following lyophilization of the pure fractions, the peptides may be characterized using electrospray or other types of mass spectrometry and by amino acid analysis.

### EXAMPLE 3

### Analysis of Ovarian Tumor cDNA Expression Using Microarray Technology

[0318] This example describes microarray expression analysis of ovary tumor-and tissue-specific cDNAs.

[0319] Sequences disclosed herein were found to be overexpressed in specific tumor tissues as determined by microarray analysis. Using this approach, cDNA sequences are PCR amplified and their mRNA expression profiles in tumor and normal tissues are examined using cDNA microarray technology essentially as described (Schena, M. et al., 1995 Science 270:467-70). In brief, the clones are arrayed onto glass slides as multiple replicas, with each location corresponding to a unique cDNA clone (as many as 5500 clones can be arrayed on a single slide, or chip). Each chip is hybridized with a pair of cDNA probes that are fluorescence-labeled with Cy3 and Cy5, respectively. Typically, 1 μg of polyA⁺ RNA is used to generate each cDNA probe. After hybridization, the chips are scanned and the fluorescence intensity recorded for both Cy3 and Cy5 channels. There are multiple built-in quality control steps. First, the probe quality is generally monitored using a panel of ubiquitously expressed genes. Secondly, the control plate also can include yeast DNA fragments of which complementary RNA may be spiked into the probe synthesis for measuring the quality of the probe and the sensitivity of the analysis. Currently, the technology offers a sensitivity of about 1 in 100,000 copies of mRNA. Finally, the reproducibility of this technology can be ensured by including duplicated control cDNA elements at different locations.

[0320] The clones described herein were randomly picked from an ovarian metastatic PCR subtracted library (OvMS library; also called OPs library) and a primary ovarian tumor PCR-subtraction library (PrOvS library; also called OTs library) described in Example 1. A total of 2016 clones (1056 from OPs and 960 from OTs) were arrayed. cDNA inserts for arraying were amplified by PCR using vector specific primers. The resulting PCR products were sequenced in one direction and the trimmed sequences disclosed in Example 1 (SEQ ID NO:1-1412 and 1509-1730). The arrays were probed with 35 probe pairs (normal tissues and ovary tumor and normal-specific probes). Analysis consists of determining the ratio of the mean or median hybridization signal for a particular element (cDNA) using two sets of probes. The ratio is a reflection of the over- or under-expression of the element (cDNA) within the probe population. Probe groups were set up to identify elements (cDNAs) with high differential expression in probe group#1: Analysis #1 compared ovary tumor (probe group #1) and non-ovary normal tissue (probe group #2); Analysis #2 compared normal and tumor ovary (probe group #1) and normal essential tissues (probe group #2); Analysis #3 used the same probe groups as analysis #2 with the addition of probe pairs that had to be repeated due to initial failure. A threshold (fold-overexpression in probe group #1) was set at 3.0 (analysis #1) or 2.5 (analysis #2 and #3). This threshold was set based on experience to identify elements with overexpression that could be reproducibly detected. Elements identified by these analyses are shown in Tables 2-4. Elements within each analysis were ranked on mean signal 2 and mean signal 1: Mean Signal 2<0.1 identifies elements with potentially very low background; Mean Signal 2 0.1-0.2 identifies elements with potentially some background; Mean signal 2>2.0 identifies elements with potentially higher background. Tabulation of analysis #2 only shows elements that are not identified in analysis #1. Analysis #3 only shows elements that are not identified by either analysis #1 or #2. The elements identified were compared to sequences in publically available databases. Those sequences showing some degree of similarity are detailed in Tables 2-4. Sequences of elements identified by this analysis are disclosed in SEQ ID NO:1413-1508.

TABLE 2
Analysis #1: High Differential Expression in Group 1
Ovary Tumor cy3>Normal Tissue cy5
Threshold: 3

| SEQ | Clone | | | | |
|---|---|---|---|---|---|
| ID NO | Identifier # | Ratio | Mean Signal 1 | Mean Signal 2 | EST/GenBank Annotation |
| 1413 | 33482 | 4.34 | 0.366 | 0.084 | Novel = O772P |
| 1414 | 33380 | 3.54 | 0.315 | 0.089 | Novel = O772P |
| 1415 | 33498 | 3.31 | 0.313 | 0.095 | Novel = O772P |
| 807 | 33161 | 3.63 | 0.273 | 0.075 | Retinoic acid-binding protein II |
| | | | | | (CRABP-II) |
| 1416 | 33855 | 3.04 | 0.27 | 0.089 | Glucose regulated protein, GRP78 |
| 1417 | 33872 | 4.83 | 0.241 | 0.05 | Novel = O772P |
| 1418 | 34863 | 4.01 | 0.226 | 0.056 | Wnt inhibitory factor-1 (WIF-1) |
| 1419 | 34558 | 3.09 | 0.224 | 0.073 | Zinc finger protein HZF1. Genomic |
| | | | | | clone, chromosome 19 |
| 1420 | 34582 | 3.52 | 0.217 | 0.062 | TAR RNA loop binding protein |
| | | | | | (TRP-185) |
| 43 | 34409 | 3.25 | 0.204 | 0.063 | Fibroblast growth factor inducible |
| | | | | | gene 14 (FTN14) |
| 1421 | 34598 | 3.01 | 0.198 | 0.066 | Genomic clone, chromosome |
| | | | | | 20p11.21-11.23 = O8E |
| 1422 | 34517 | 7.11 | 0.169 | 0.024 | Mitotic checkpoint kinase Bub 1 |
| | | | | | (BUB 1) |
| 1423 | 34093 | 3.37 | 0.165 | 0.049 | Novel |
| 1424 | 33345 | 4.06 | 0.775 | 0.191 | cDNA clone, KIAA0762 |
| 1425 | 34445 | 3.58 | 0.709 | 0.198 | Ribophorin I |
| 382 | 34008 | 5 | 0.681 | 0.136 | Genomic clone, chromosome 20 |
| 1426 | 34946 | 3.59 | 0.678 | 0.189 | Wnt inhibitory factor-1 (WIF-1) |
| 1427 | 34751 | 4.74 | 0.608 | 0.128 | Putative Integral membrane |
| | | | | | transporter protein (LC27) |
| 1428 | 33813 | 4.69 | 0.592 | 0.126 | Ribosomal protein L3 |
| 1429 | 34122 | 4.73 | 0.587 | 0.124 | Ribophorin I |
| 1430 | 34162 | 3.18 | 0.466 | 0.147 | Keratin 19 |
| 1431 | 33858 | 3.08 | 0.379 | 0.123 | Fibrillarin (Hfib 1), casein kinase II |
| | | | | | beta subunit |
| 1432 | 34861 | 3.14 | 0.363 | 0.116 | Keratin 19 |
| 1433 | 34237 | 4.08 | 13.106 | 3.211 | |
| 1434 | 34496 | 4.23 | 5.957 | 1.408 | |
| 1435 | 33673 | 4.22 | 6.908 | 1.638 | Elongation factor 1-alpha (EF-1) |
| 1436 | 34058 | 3.31 | 5.396 | 1.629 | Elongation factor 1-alpha 1 |
| 1437 | 34143 | 3.5 | 3.477 | 0.995 | GAPDH |
| 1438 | 33603 | 3.39 | 1.861 | 0.548 | Ribosomal Protein S3 |
| 1439 | 33742 | 3.74 | 1.644 | 0.439 | Ribosomal protein S3 |
| 1440 | 33555 | 3.81 | 1.581 | 0.415 | Collagen alpha-2 type I (COL1A2) |
| 1441 | 33656 | 5.13 | 1.569 | 0.306 | Collagen alpha-1 type I (COL1A1) |
| 1442 | 33562 | 3.19 | 1.536 | 0.481 | Collagen alpha-2 type I(COL1A2) |
| 1443 | 34501 | 3.61 | 1.456 | 0.403 | hmRNP A1 |
| 1444 | 33302 | 3.33 | 1.454 | 0.437 | Ribosomal Protein S3 |
| 1445 | 34276 | 3.35 | 1.429 | 0.427 | eIF-4AII |
| 1446 | 33967 | 3.96 | 1.369 | 0.346 | Fibronectin |
| 1447 | 33220 | 3.97 | 1.326 | 0.334 | Collagen alpha-1 type I (COL1A1) |
| 1448 | 34006 | 3.26 | 1.284 | 0.394 | Carcinoma associated antigen |
| | | | | | GA733-2/KSA |
| 1449 | 34088 | 4.89 | 1.277 | 0.261 | Putative integral membrane |
| | | | | | transporter protein (LC27) |
| 1450 | 33720 | 3.87 | 1.277 | 0.33 | Collagen alpha-1 type I (COL1A1) |
| 1451 | 34801 | 4.3 | 1.267 | 0.295 | eIF-4A |
| 1452 | 33033 | 4.71 | 1.174 | 0.249 | Keratin 8 |
| 1453 | 34310 | 3.02 | 1.114 | 0.369 | Genomic clone, BAC from 7p15 |
| 1454 | 33592 | 3.53 | 1.004 | 0.285 | Collagen alpha-1 type III (COL3A1) |
| 632 | 33055 | 4.31 | 0.955 | 0.222 | cDNA clone DKFZp564N1116 |
| 1455 | 34279 | 3.78 | 0.939 | 0.248 | hnRNP A1 |
| 1456 | 34541 | 3.65 | 0.937 | 0.257 | hnRNP A1 |
| 1457 | 34380 | 3.66 | 0.867 | 0.237 | eIF-4AI |
| 1458 | 34675 | 3.63 | 0.775 | 0.214 | Ribosomal protein L5 |
| 1459 | 33291 | 3.14 | 0.698 | 0.222 | Collagen alpha-1 type III (COL3A1) |
| 1460 | 34694 | 3.2 | 0.679 | 0.212 | Genomic clone, Xq13; X |
| | | | | | inactivation transcript (XIST) |

[0321] TABLE 3
Analysis #2: High Differential Expression in Group 1
Normal and Tumor Ovary > Normal Essential Tissues
Threshold: 2.5

| SEQ | Clone | | | | |
|---|---|---|---|---|---|
| ID NO | Identifier # | Ratio | Mean Signal 1 | Mean Signal 2 | EST/GenBank Annotation |
| 1461 | 33660 | 5.05 | 0.491 | 0.097 | 1-218 is novel; 218-305 is vector? |
| 1462 | 33277 | 2.93 | 0.284 | 0.097 | Partial unknown mRNA from drug- |
| | | | | | resistant melanoma cells |
| 1463 | 33376 | 3.19 | 0.253 | 0.079 | Novel = O772P |
| 1464 | 33462 | 2.7 | 0.238 | 0.088 | Novel = O772P |
| 1465 | 32951 | 2.78 | 0.234 | 0.084 | Keratin 19 |
| 1466 | 34405 | 2.63 | 0.232 | 0.088 | c-kit proto-oncogene (stem cell |
| | | | | | growth factor receptor) |
| 1467 | 34305 | 2.57 | 0.217 | 0.085 | Wnt inhibitory factor-1 (WIF-1) |
| 1468 | 33508 | 2.68 | 0.203 | 0.076 | Insulin-like growth factor II (IGF-2) |
| | | | | | exon 7 with additional ORF |
| 1212 | 33750 | 2.68 | 0.187 | 0.07 | DEK putative oncogene (leukemia); |
| | | | | | 1-387 bp; 387+ = vector |
| 1469 | 34873 | 3.02 | 0.165 | 0.055 | Apurinic/apyrimidinic endonuclease |
| | | | | | (HAP1); REDOX factor |
| 1377 | 33885 | 2.83 | 0.143 | 0.051 | Genomic clones, HLA class I |
| | | | | | region?Bases after 101 are vector? |
| 1470 | 34542 | 2.62 | 0.125 | 0.048 | Estrogen receptor (ESR1) |
| 1471 | 33644 | 3.01 | 0.557 | 0.185 | Novel = O772P |
| 1472 | 34344 | 2.62 | 0.505 | 0.193 | HER2/c-erb-B-2 (tyrosine kinase |
| | | | | | receptor) = Her 2 neu |
| 1473 | 33414 | 2.66 | 0.494 | 0.186 | Collagen alpha-2 type I (COL!A2) |
| 1474 | 34298 | 2.78 | 0.488 | 0.175 | Keratin 19 |
| 1475 | 33624 | 2.72 | 0.442 | 0.163 | Jerky (mouse) homolog-like (JRKL); |
| | | | | | nucl. reg., role in epilepsy? |
| 1476 | 34047 | 3.38 | 0.406 | 0.12 | Fibroblast growth factor inducible |
| | | | | | gene 14 (FIN14) |
| 1477 | 33173 | 2.84 | 0.343 | 0.121 | Fibronectin (FN1) |
| 1478 | 34607 | 2.59 | 0.34 | 0.131 | HER2/c-erb-B-2 (tyrosine kinase |
| | | | | | receptor) = Her 2 neu |
| 1479 | 33404 | 2.65 | 0.32 | 0.121 | Novel = O772P |
| 1480 | 33069 | 2.8 | 7.953 | 2.841 | |
| 1481 | 33847 | 3.42 | 2.541 | 0.743 | |
| 1482 | 34527 | 2.51 | 2.089 | 0.833 | |
| 1483 | 33427 | 2.68 | 1.999 | 0.746 | |
| 1484 | 33035 | 3.31 | 1.799 | 0.543 | |
| 1485 | 34079 | 2.57 | 1.562 | 0.608 | |
| 1486 | 33680 | 2.53 | 1.477 | 0.584 | |
| 1487 | 33463 | 2.87 | 1.207 | 0.42 | |
| 1488 | 33207 | 2.87 | 1.053 | 0.367 | |
| 1489 | 34256 | 2.63 | 0.911 | 0.347 | |
| 1490 | 33581 | 2.81 | 0.86 | 0.306 | |
| 1491 | 33634 | 2.71 | 0.794 | 0.293 | |
| 1492 | 34539 | 2.85 | 0.637 | 0.224 | |
| 1493 | 32961 | 2.98 | 0.626 | 0.21 | |
| 1494 | 33790 | 2.58 | 0.621 | 0.24 | |
| 1495 | 33284 | 2.58 | 0.617 | 0.239 | |
| 1496 | 33183 | 2.64 | 0.589 | 0.223 | |
| 1497 | 33388 | 2.5 | 0.557 | 0.223 | |

[0322] TABLE 4
Analysis #3: High Differential Expression in Group 1
N and T Ovary (re-probe) > Normal Essential Tissues (re-probe)
Threshold: 2.5

| SEQ | Clone | | | | |
|---|---|---|---|---|---|
| ID NO | Identifier # | Ratio | Mean Signal 1 | Mean Signal 2 | EST/GenBank Annotation |
| 1498 | 33090 | 2.53 | 0.247 | 0.098 | Genomic clone, chromosome |
| | | | | | 20p12.3-13 |
| 1499 | 33239 | 2.73 | 0.52 | 0.191 | Genomic clone, chromosome 6; |
| | | | | | (breast cancer antigen discovery) |
| 886 | 34943 | 2.52 | 0.317 | 0.126 | Wnt inhibitory factor-1 (WIF-1) |
| 1500 | 33654 | 2.51 | 6.272 | 2.499 | Collagen alpha-1 type 1 (COL1A1) |
| 1501 | 33999 | 2.52 | 2.285 | 0.908 | Thymosin beta-4; interferon- |
| | | | | | inducible |

[0323] Based on the microarray profile and database search results, several cDNAs identified above were further analyzed by Real Time PCR. Clone 0990P (SEQ ID NO:1502; Clone Identifier #:33055/61229) showed overexpression in most tumors and some expression in bone marrow and brain. Clone 0989P (SEQ ID NO:1506; Clone Identifier #33161/59657) was overexpressed in most tumors (n=13) and showed some expression in normal breast, ureter, and oesophagus.

[0324] From the foregoing it will be appreciated that, although specific embodiments of the invention have been described herein for purposes of illustration, various modifications may be made without deviating from the spirit and scope of the invention. Accordingly, the invention is not limited except as by the appended claims.

What is claimed:

1. An isolated polynucleotide comprising a sequence selected from the group consisting of:
(a) sequences provided in SEQ ID NO:1413-1508;
(b) complements of the sequences provided in SEQ ID NO:1413-1508;
(c) sequences consisting of at least 20 contiguous residues of a sequence provided in SEQ ID NO:1413-1508;
(d) sequences that hybridize to a sequence provided in SEQ ID NO:1413-1508, under moderately stringent conditions;
(e) sequences having at least 75% identity to a sequence of SEQ ID NO:1413-1508;
(f) sequences having at least 90% identity to a sequence of SEQ ID NO:1413-1508; and
(g) degenerate variants of a sequence provided in SEQ ID NO:1413-1508.

2. An isolated polypeptide comprising an amino acid sequence selected from the group consisting of:
(a) sequences encoded by a polynucleotide of claim 1; and
(b) sequences having at least 70% identity to a sequence encoded by a polynucleotide of claim 1; and
(c) sequences having at least 90% identity to a sequence encoded by a polynucleotide of claim 1.

3. An expression vector comprising a polynucleotide of claim 1 operably linked to an expression control sequence.

4. A host cell transformed or transfected with an expression vector according to claim 3.

5. An isolated antibody, or antigen-binding fragment thereof, that specifically binds to a polypeptide of claim 2.

6. A method for detecting the presence of a cancer in a patient, comprising the steps of:
(a) obtaining a biological sample from the patient;
(b) contacting the biological sample with a binding agent that binds to a polypeptide of claim 2;
(c) detecting in the sample an amount of polypeptide that binds to the binding agent; and
(d) comparing the amount of polypeptide to a predetermined cut-off value and therefrom determining the presence of a cancer in the patient.

7. A fusion protein comprising at least one polypeptide according to claim 2.

8. An oligonucleotide that hybridizes to a sequence recited in SEQ ID NO:1413-1508 under moderately stringent conditions.

9. A method for stimulating and/or expanding T cells specific for a tumor protein, comprising contacting T cells with at least one component selected from the group consisting of:
(a) polypeptides according to claim 2;
(b) polynucleotides according to claim 1; and
(c) antigen-presenting cells that express a polynucleotide according to claim 1,
under conditions and for a time sufficient to permit the stimulation and/or expansion of T cells.

10. An isolated T cell population, comprising T cells prepared according to the method of claim 9.

11. A composition comprising a first component selected from the group consisting of physiologically acceptable carriers and immunostimulants, and a second component selected from the group consisting of:
(a) polypeptides according to claim 2;
(b) polynucleotides according to claim 1;
(c) antibodies according to claim 5;
(d) fusion proteins according to claim 7;
(e) T cell populations according to claim 10; and
(f) antigen presenting cells that express a polypeptide according to claim 2.

12. A method for stimulating an immune response in a patient, comprising administering to the patient a composition of claim 11.

13. A method for the treatment of a cancer in a patient, comprising administering to the patient a composition of claim 11.

14. A method for determining the presence of a cancer in a patient, comprising the steps of:
(a) obtaining a biological sample from the patient;
(b) contacting the biological sample with an oligonucleotide according to claim 8;
(c) detecting in the sample an amount of a polynucleotide that hybridizes to the oligonucleotide; and
(d) compare the amount of polynucleotide that hybridizes to the oligonucleotide to a predetermined cut-off value, and therefrom determining the presence of the cancer in the patient.

15. A diagnostic kit comprising at least one oligonucleotide according to claim 8.

16. A diagnostic kit comprising at least one antibody according to claim 5 and a detection reagent, wherein the detection reagent comprises a reporter group.

17. A method for inhibiting the development of a cancer in a patient, comprising the steps of:
(a) incubating CD4⁺ and/or CD8⁺ T cells isolated from a patient with at least one component selected from the group consisting of: (i) polypeptides according to claim 2; (ii) polynucleotides according to claim 1; and (iii) antigen presenting cells that express a polypeptide of claim 2, such that T cell proliferate;
(b) administering to the patient an effective amount of the proliferated T cells,
and thereby inhibiting the development of a cancer in the patient.

The application's sequence listing, which the Patent Office published only in electronic form, follows.

SEQUENCE LISTING (1730 sequences)

SEQ ID NO: 1 - DNA, 264 bp, Homo sapiens
ctggtatcacactctacccaagtcccaaaagcaggttcacataactcctgtcttcattatctgatatccgggactttttccctttcaccttccattataggatgatgcagcaagaaggccctcaccagataccagtcctttgatcttggactacccaggcttcagaactataagaaataaatctccgttctttgaggattacccagtttgtgctattctgttatggcagcacaaaatggactaagacataggtccaatctaagg

SEQ ID NO: 2 - DNA, 550 bp, Homo sapiens
  misc_feature (1)...(550): n = A,T,C or G
ctgaggaanntcttcattggagggttgagctttgaaacaactgatgagagcctgaggagccattttgagcaatggggaacgctcacggactgtgtggtaatgagagatccaaacaccaagcgctccaggggctttgggtttgtcacatatgccactgtggaggaggtggatgcagctatgaatgcaaggccacacaaggtggatggaagagttgtggaaccaaagagagctgtctccagagaagattctcaaagaccaggtgcccacttaactgtgaaaaagatatttgttggtggcattaaagaagacactgaagaacatcacctaagagattattttgaacagtatggaaaaattgaagtgattgaaatcatgactgaccgaagcagtggcaagaaaaggggctttgcctttgtaacctttgacgaccatgactccgtggataagattgtcattcagaaatccattcctgtgaatggacctgcccggccggncaagggcgaaattcaacacactttggcggcgttacctaanggatcccaacttcggt

SEQ ID NO: 3 - DNA, 434 bp, Homo sapiens
aaatttatgaaactttcgaacagtagcaactgaaatttgtcacttttctgttacgcagagaatcagaccttttgataatatttgggagggtaaaagaaatatgccaaatatgaaacctttttgtcagcactacatacatcttttttttgcggggggcgggggggacagagtctcactgtgtcactcagactggagtacagtgatgcgatctcggctcactgcaacctccgcctcctgggttcaagcgattctcctgcttcagcctcctgagtagctgggattacaggtgcacaccaccacgcccggctaatttttgtatttttagtagagatggggtttcaccatgttggtcaggctggtcttgaactcctgacctcgttcctgccttagcctcctaaagtgccgggattacaggcgtgaaccaccgcacctgg

SEQ ID NO: 4 - DNA, 381 bp, Homo sapiens
aaaagaaaagacacctgggcctgggggaccactaccaccaagacgcggagaccagtagtggccccaaatgccaggctgcactgatatttattggatataagacaaaggggcagggtaaggaatgtgaaccatctccaataataggtaaggtcacatgggtcatgtgtccactggacagggggcccttccctgcctggcagcagaggcagagagagagagaagagagagagacagcttatgccattatttctgcatatcagacatttagtactttcactaatttgctcctgctatctaaaaggcagagccaggtatacaggatggaacatgaaagcggactaggagcgtgaccactgaagcacagcatcacagggagacagg

SEQ ID NO: 5 - DNA, 422 bp, Homo sapiens
aaatggttacattgtaaactgttatataagtacctgataatatcattaattttgtttcttggcctgccatgcttaaaatattaactctctggccctttaagaaaaaaacgtgctgacccctgctctagatcaaagaaaacaaacctcaaaaatactttcctccctctaccccacttgacccttgtcccggggcagtaggcatctccgtcaaaactcttgtccctggtctgtggtaactttctcagctccccaacccatgtccctcaaagtcccctccctatagggcaagaacccagcaacttcgctctgccccgactctaggcgggatgtagctcattttgggatacgagtctccatcgtggagcctggcttcttccgaacccctgtgaccaacctggagagtctggagaaaaccctgcagg

SEQ ID NO: 6 - DNA, 261 bp, Homo sapiens
  misc_feature (1)...(261): n = A,T,C or G
ctgtccagtgacatctagggaagcccagcccccagcagcagcaggaactcttggggacagtctgtcttgttgcaaagccagcacagcaagcagcctccgcattagttccatagcttgactggcttctaagatgggcattgtcaagatncagaaatctcaaagcatcccctctttgggctncatcatccaagggtgagaaacagcagagcctaagtgagaagtctgagtcaacaccttggctcagttttcaaaatgaatttt

SEQ ID NO: 7 - DNA, 428 bp, Homo sapiens
ctcacgttgatgtcaagactaccgatggttacttgcttcgtctgttctgtgttggttttactaaaaaacgcaacaatcagatacggaagacctcttatgctcagcaccaacaggtccgccaaatccggaagaaagatgatggaaatcatgacccgagaggtgcagacaaatgacttgaaagaagtggtcaataaattgattccagacagcattggaaaagacatagaaaaggcttgccaatctatttatcctctccatgatgtcttcgttagaaaagtaaaaatgctgaagaagcccaagtttgaattgggaaagctcatggagcttcatggtgaaggcagtagttctggaaaagccactggggacgagacaggtgctaaagttgaacgagctgatggatatgaaccaccagtccaagaaatctgttt

SEQ ID NO: 8 - DNA, 305 bp, Homo sapiens
cctggccgtgttggccgcctttctggaggagggcccggaagaaaacagtgcctatgagcagttgctgtctcgcttggaagaaatcgctgaggaaggctcagagactcaggtcccaggactggacatatcttgcactcctgccctctgacttcagccgctacttccaatatgaggggtctctgactacaccgccctgtgcccagggtgtcatctggactgtgtttaaccagacagtgatgctgagtgctaagcagctccacaccctctctgacaccctgtggggacctggtgactctcggctacag

SEQ ID NO: 9 - DNA, 344 bp, Homo sapiens
aaatgacgaaactcagcggaaatatattcagggattgaagaggttaatgaccatttgccagaaacactttcctacagacccatccaaatgtgtggagtacaatgcactgtgagatctgtgtatggtgtgttaataacaataagaaacttagggaagcaggctgtggacttctggaattaccaacaggaatgaggaaagaagaaaactggagtttccagtctctgagttctacctgatgtaactcttgattggttttaagaactttgttggccttcatttcatatctgactgcaagctgatttttctttcttgctttcattttaattagtccaaaattaagtttt

SEQ ID NO: 10 - DNA, 377 bp, Homo sapiens
aaaacctttagcatttctgcctataatatttgggttttcttcttttcctatctttatttgataagtcccatcaaatattttccccataatcacaatgttttcttttcactttgctcaagaactgagttatgagctccaaaatttggacaaactctacattggctaagttttagtcatttgcactgctaagaaagatgacaattcagcatgctgaagatgacttcctcccttataaaggggctaacacagagggcaatactgttcatgcttctgattcttgatcacaagaattgctttaggcaattacaatcatgtctcctctgacacatcatattattcaagtgagacagagaaagaagatgtcctatgtcacacag

SEQ ID NO: 11 - DNA, 381 bp, Homo sapiens; identical to SEQ ID NO: 4

SEQ ID NO: 12 - DNA, 219 bp, Homo sapiens
cctgaaggaagagctggcctacctgaagaagaaccatgaggaggaaatcagtacgctgaggggccaagtgggaggccgggtcagtgtggaggtggattccgctccgggcaccgatctcgccaagatcctgagtggcatgcgaagccaatatgaggtcatggccgagcagaaccggaaggatgctgaagcctggttcaccagccggactgaagaattgaa

SEQ ID NO: 13 - DNA, 355 bp, Homo sapiens
  misc_feature (1)...(355): n = A,T,C or G
aaataatccaggcaggagaagagaggagggcacacttggaactcccctccccacaatacgtgattatttacattttagtaattggacaatcccggctcaggaggaggttgcaagaatctgcaaaagttggagggagcgccccaggagaacaaacagcaagccttatttcccctagcccatcccccaaaaaaccatccatcccatcctagtgtctggtggtgtccggtggtgtccatcttccattccttcccaaattatggaagtaaggttcttctcaccagaataagagcacttgggataacagagtagggtcccctcacccaaaaaaaaaaaaaaaaaaaaancttnggggaaa

SEQ ID NO: 14 - DNA, 658 bp, Homo sapiens
  misc_feature (1)...(658): n = A,T,C or G
gaaaagttcccattcaggtgtcttggaaattgaaaattcagtagatgatctgagtagcagaatggacatacttgaagaaagaatagacagtctagaagatcaaattgaagaattctctaaggatacaatgcaaatgaccaaacagataattagtaaagaaaggcaaagagatatagaggagagatctagaagttgcaacattcgtttgataggaattccagaaaaggagagttatgagaatagggcagaggacataattaaagaaataattgatgaaaactttgcagaactaaagaaaggttcaagtcttgagattgtcagtgcttgtcgagtacctagtaaaattgatgaaaagagactgactcctagacacatcttggtgaaattttggaattctagtgataaagagaaaataataagggcttctagagagagaagagaaattacctaccaaggaacaagaatcnggttgacagcagacttatcctggacacactggatgctagaagtaaatgggagccaatgtnttcaaaggtcttgcttggaaaanggcttttaatcctagaatcttttttccanccanattgccttttgatttanggggtaanccaaaggnttttttntnttgaagaatttagcngatttgtttgcattngcc

SEQ ID NO: 15 - DNA, 713 bp, Homo sapiens
  misc_feature (1)...(713): n = A,T,C or G
ctgcaattacatcattttttatctatcttctgcttttactttgtgtagggtagggatggggacttacaaatgggccaaagacacttcaacctcaaaaccaaagagaaatctctgcttgcagagatacaaagaaagtaactctccctcttatgaaaagcaaccaggaactctactccagttatgagggccactgatggtgtgggagagctatcaagaagattcttcctagacgtggtgcaaagacagtgagaacccaggaaatcacattcatgggacacttgctcttaccgtcatcaccctctattctatctcaactttggccccatcaaatctaatgataaacaaaagaaggtaattacatgtagaaaatcaaagtgaatgggaatgtggtggtgtgaacataaaagaagaaattgaaaacaatcaaaagtttctcagtgctgctttcccgcactgtcatagaaatctctgatccaattcttcatatgtctaacttccaaggaancgggctaacagcacanacataggatccaaggcattcttggngcggaaaattaagnggngggccccctttngaatggggactgcaaccananggctgggaaatccttatactcccctcccgnccggggctaattnccattggtgaaacaatgttgggggggaaaaaaggttttgctcctacctanangaaccagagggcttgttccccc

SEQ ID NO: 16 - DNA, 616 bp, Homo sapiens
  misc_feature (1)...(616): n = A,T,C or G
ttcaaagaatcacttttaggcttacaaaaataaatatttgtcaaaatgttcaataaatattacataaaactagcagcaaaaagtatctagaaatctgtcgtgtgcaaatagttttcttcccaactatcattcccatggtcccaaataaattttagaatctagtcccatccccttcctagacaagctgcgttcaacaatctccaagagacaaagtaagattggaagtttaaggacacgcacacaagacatatatataaaattctctgaatgtgcaataaaagaagtactttgtaaaaagttatgggcaaaatgtacaagggcctaaacctagactaattgaaatagcaccataacaaatgacctcaatactgtcaagtgcacctacttaataaaagttttagaacaaggcacaatacacttgaaaatctattgcactttaggaaatttttgccgtcttcctatgccactgtaaaaagatggagcgttttgatcaccgcattctggacctcgggccgcgacccacgctaagggcgaaattncagcaccccttngcgggccgnttnctagtgggatcccaactcggtacccaaacnttggcgtnaatcatgggccatta

SEQ ID NO: 17 - DNA, 733 bp, Homo sapiens
  misc_feature (1)...(733): n = A,T,C or G
ttcaaagcctgtctgcgagcctggctgtggtgcacatggaacctgccatgaacccaacaaatgccaatgtcaagaaggttggcatggaagacactgcaataaaaggtacgaagccagcctcatacatgccctgaggccagcaggcgcccagctcaggcagcacacgccttcacttaaaaaggccgaggagcggcgggatccacctgaatccaattacatctggtgaactccgacatctgaaacgttttaagttacaccaagttcatagcctttgttaacctttcatgtgttgaatgttcaaataatgttcattacacttaagaatactggcctgaattttattagcttcattataaatcactgagctgatatttactcttccttttaagttttctaagtacgtctgtagcatgatggtatagattttcttgtttcagtgctttgggacagattttatattatgtcaattggatcagggtaaaattttcagtgtgtagttggcagatattttcaaaattacaatgcatttatggtgtctgggggcanggggaacatcagaaaggttaaattggggcaaaaatggcgtaagtcacaaaaaattggaatggtgcaagttaattgttgaaagtacancaatttcanatttattggcananatttagangttggttacatttttacttggccggaacacctaanggcgnaatncacacactggnggcngtatangggn

SEQ ID NO: 18 - DNA, 148 bp, Homo sapiens
ggcaggtaaagtaagtcgtttccttttatttgaacacctaggggccattttagagttataattagcccaatttctatatcattttgtctcagggaatagaagcgtgagggagggagagagttgggggaatggctggttggtagagtgg

SEQ ID NO: 19 - DNA, 130 bp, Homo sapiens
aaaagacctcaagaaagcaacgaaaggaacgcaagaacagaatgaagaaagtcagggggactgcaaaggccaatgttggtgctggcaaaaagccgaaggagtaaaggtgctgcaatgatgttagctgtgg

SEQ ID NO: 20 - DNA, 341 bp, Homo sapiens
ctgcccaagggcgttcgtaacgggaatgccgaagcgtgggaaaaagggagcggtggcggaagacggggatgagctcaggacagagccagaggccaagaagagtaagacggccgcaaagaaaaatgacaaagaggcagcaggagagggcccagccctgtatgaggaccccccagatcagaaaacctcacccagtggcaaacctgccacactcaagatctgctcttggaatgtggatgggcttcgagcctggattaagaagaaaggattagattgggtaaaggaagaagccccagatatactgtgccttcaagagaccaaatgttcagagaacaaactaccag

SEQ ID NO: 21 - DNA, 698 bp, Homo sapiens
  misc_feature (1)...(698): n = A,T,C or G
ctgttgaaatgaagcactttacagtctttgtggcagcagaatatacttgtccatggttcatatcaatgctaaaattccggcagggaaaaaaatgatatgttaagcacccaaatcttcacatggagggggagggggtggggaaaagaaggaaaaaaagggaaaaacaaccaaaataatttaagtaaatgacagattggaaaacagggtttataaaaattattctcttgagtttataaattgttaaactcaatttatagctatgttaaactacgtaagaaccactatactgaaagaccatttaagagtattagtttatcttttagggaggaaaattaagaaaggaaaagtaaataagatcttacctaaagaagtttaactgaagcttagaactattttgctctacaccctcagctttcgttggnatccttataaactactgtattaaaggttttgtagaaacagcacagttntttaagactggcttgaacttattangccgtcaanagttctcttgnactannacctgtgtcccttgagagtcctcgctggggttatttcctttccttnntttgaaaaanccagcttttaaaaaatttaaaaggggtttcttctngcaganatncccntaagtanccacntnccttatcctgagaanggcnacacncacttantttaccgctttntnttttccaaattac

SEQ ID NO: 22 - DNA, 58 bp, Homo sapiens
  misc_feature (1)...(58): n = A,T,C or G
tcccaggccgatctcaaactcntganctcctaanncacctgcntcagacccccaaagt

SEQ ID NO: 23 - DNA, 332 bp, Homo sapiens
ctttgggaaagttggtatgaagcattaccacttaaagaggaaccagagcttctgcccaactgtcaaccttgacaaattgtggactttggtcagtgaacagacacgggtgaatgctgctaaaaacaagactggggctgctcccatcattgatgtggtgcgatcgggctactacaaagttctgggaaagggaaagctcccaaagcagcctgtcatcgtgaaggccaaattcttcagcagaagagctgaggagaagattaagagtgttgggggggcctgtgtcctggtggcttgaagccacatggagggagtttcattaaatgctaactactttt

SEQ ID NO: 24 - DNA, 273 bp, Homo sapiens
aaaaaggtggtagaggacattgaatacctgaagttcgataaagggccgtggctcaagcaggacaatcgcactttataccacctgcgattactggttcaggataagtttgaggtgctgaattacacaagcattcctatctttctcccggaagtcaccattggagctcatcagactgaccgtgtcttacatcagttcagagagctgccgggccgcaagtacagccctgggtacagcaccgaggtgggagacaagtggatctggctgaagtgaacg

SEQ ID NO: 25 - DNA, 615 bp, Homo sapiens
  misc_feature (1)...(615): n = A,T,C or G
aaagtttgtgcctgtaatacagtccgtgatatactggaaggcagaacaattagtgttcaatttaaccagctatttcttagaccaaataaagagaaaatagactttcttcttgaggtatgttcaagatcagtaaatttagaaaaagcttcagagtctttgaaaggaaacatggctgcttttctaaagaatgtgtgtctggggttggaagatctgcagtatgttttcatgatttcttcacatgagcttttcattacattgttgaaagatgaagaacgaaagctacttgttgatcagatgaggaagagatcccctagagtaaatctgtgcattaaacctgtaacttcattttatgatatcccagcttcagcaagtgtcaacattggtcagttagagcatcaacttatattgtcagtggatccttggaggattagacaaattttaattgaattacatggtatgacttcagaacgccagttctggacagtgtctaataagtgggaagtaccttctgtctatagtggtgttatcctgggaattaaagacaatttaacangangatttggnttatattcttatgggacctgcccggcggccctcnaaagggcgaattcacac

SEQ ID NO: 26 - DNA, 714 bp, Homo sapiens
  misc_feature (1)...(714): n = A,T,C or G
ccacaaaaaagcatgcaaagtcattgttacaacagggatctacagaactatttcaccaccagatatgacctagttttatatttctgggaggaaatgaattcatatctagaagtctggagtgagcaaacaagagcaagaaacaaaaagaagccaaaagcagaaggctccaatatgaacaagataaatctatcttcaaagacatattagaagttgggaaaataattcatgtgaactagacaagtgtgttaagagtgataagtaaaatgcacgtggagacaagtgcatccccagatctcagggacctccccctgcctgtcacctggggagtgagaggacaggatagtgcatgttctttgtctctgaatttttagttatatgtgctgtaatgttgctctgaggaagcccctggaaagtctatcccaacatatcccatcttatattccacaaattaagctgtagtatgtaccctaagacgctgctaattgactgcccttcgcaactcaggggcggctgcattttagtaatggggtcaaatgattactttttatgatgcttccaaagngccttngcttntnttnccaacttgacaaaangcaaagtgagaaaaatgatcntattttacnttaccnacagcngggaccccttttttaataactggcaccttnttttcctnccggcggcntnaaaggggaattccccccntgngcgttctag

SEQ ID NO: 27 - DNA, 401 bp, Homo sapiens
ccatcatcgcacaaggaaactggtttcatactgaagtttaagactgagttctacacctgtgggcttctacactacggaacgggagtgggggggctgaaaagcttattaatatactttgtcttagcccacactgcaaatacagcactattatggcatcttaatcaagcagagagctgttcacatgctttctacagtatctttataaataaaaggttcctttatccaccaaacaacacctgaaatgatctaagttcaaaacattagtatacaaggacctagataatgggacatgtgaaaacttagtacattcaatttaggttttggacacttagttggataaacaagtttatttgtaaatttagtcaacatacataattgacctaaaaacttcagtaaatttt

SEQ ID NO: 28 - DNA, 444 bp, Homo sapiens
ctggcaacaaacctgaccacatgattaagcctgttgaagtcactgagtcagcataaataaagactgcacaggagaattacccctatacctgagcctcaaccttctgggggaaggggaactagataacatacttcttacttgtctgtacagtaccttgttgcagatgggtgatatataatggtaatagaatagcacagccagacttgcttcctgcatggtagggagagacacaaaagatgggaaactgcttttccacaaggaatctccgtagaattttgcggcgaccagatggtgcataggtctggaaggtctgatctcccttggtcttccatgggatggttagtgtggaggggagatatagattgtccggccgctttgtgattccatggattgattcagtcttctggatttttttttctttatattttgggtactggagctttt

SEQ ID NO: 29 - DNA, 159 bp, Homo sapiens
gctgacgcaaacatgcagatctttgtgaagaccctcactggcaaaaccatcacccttgaggtcgagcccagtgacaccattgagaatgtcaaagccaaaattcaagacaaggagggtatcccacctgaccagcagcgtctgatatttgccggcaaacag

SEQ ID NO: 30 - DNA, 168 bp, Homo sapiens
  misc_feature (1)...(168): n = A,T,C or G
cctcgagtctagtgaggcgcntcagaaattcgcaggagccaaagccatntcatctgacatgttctttgggcgggaggtggatgcggagtatgaggccaggtctcggccgcgaccacnctaagggcgaattccancncactgncggtcgttactagaggatncaagctc

SEQ ID NO: 31 - DNA, 685 bp, Homo sapiens
  misc_feature (1)...(685): n = A,T,C or G
aaatttgaggtggtcttaagaataacaaatgaacagaattccaaatttttgaaataggtgaactgctgcagttacaggtatacatttaggaaaactgtatagctcttacaagaccagcaatgtaactttattttgtacatttttgaattgaaaatataaacaataattaaaaaataaaaagaaaatacagcataataaaaaacatacgcttctcaattaaatgtactggatacatataaattttaagggaagaagcaaaaaaggaaaatgattgatatttaagtgcagactgactacctagacaaaaaaaaaaaaanttaaaaaantttcntaaancctttagtttttttatnactaatatccatatggtnggagtntcgccantntggaagggattttgttatgttngcatatgttacactttcngggnaattacatnatggcttttaaggccctgggaggcttggtttttggaaacaaaattggataaaaatncttgttaaaacgcaataccccttatttttttggncccccattngcaaaaaaagggaaaattccttttanatttttttacncccaaatgcctnaacttttacntttaccntggncggaaccccttanggngaattccacnccttggnggcnttctagnggatcccacttggannaactgggggaaaatggg

SEQ ID NO: 32 - DNA, 159 bp, Homo sapiens
gctgacgcaaacatgcagatctttgtgaagaccctcactggcaaaaccatcacccttgaggtcgagcccagtgacgccattgagaatgtcaaagccaaaattcaagacaaggagggtatcccacctgaccagcagcgtctgatatttgccggcaaacag

SEQ ID NO: 33 - DNA, 283 bp, Homo sapiens
  misc_feature (1)...(283): n = A,T,C or G
gtagttctgaacgttagatattttttttccatggggtcaaaaggtacctaagtatatgattgcgagtggaaaaataggggacanaaatcnggnnttggcagnttttccatttncatttgtgtgtgantcnntaatataaatgcggagacgtaaagcattaatgcaagttaaaatgtttcagagaacaantttcagcggttcactttataataattataaataaacctgttaaatttttctggacaatgccagcatttggatttttttacctgcccggggcggc

SEQ ID NO: 34 - DNA, 349 bp, Homo sapiens
ccaacatctggcttctaaaggaaaggcttttggtcttttcaatcacttgctgatagggtgagactgcattgttacccataaccacatgacctaatttagaatcaatcttggcatccagtcttgcatttctaatcaaatttacaatccacctttcagcttcttctggagtcatgttcaatttatctgccaacatgttaatgctgatacactggtggatgcgacagaaagtctcaaatatgaagagacgggcattttcaatgaaatcctcaagacaagccaccaagaagaagtcattcacaagcactgattcacattccctcagctttttctgagccccatcaaagtcaaa

SEQ ID NO: 35 - DNA, 732 bp, Homo sapiens
  misc_feature (1)...(732): n = A,T,C or G
attttgttttataaccacttctaaatattctcggttctttctttttgttgttgttaattaaggggttttggttttgttttctgtttactttgtgtgcaactacctgcttttaatgactcactttgatcaaatgacagtgaacaaagccagcccaagctggtaaggtgctgttcacttgaacaggtgctgttgcgcagaaaggaaactctgtgactaatttagatagtggctttccttcttctggattcttttcattgaattctcacagtaaatatttacggagttttcaaattgcagcaaatatactgtatgagaaaatattaatacagattaaaagcctttcttacatcttgaaaattttctaatatttgagaatttcacagggatgttttttatattggacccttttgactttccagtcctgtgactttctacttttagtagagagtcagaatctctggactggagaataatgaagaagttcactgactgtgcactgtgcttagagacccctgccgcaccacantgccaatgcttgtnagacacatgcccttcggcagcattncanaccaggangggaananaaagaanaaaactttttttccttntacttaaaaaattaggcagcttaaaaccttagggtttttttnttaacataaccaaatttcaatctttccttatttgacactgggtanaacttttgtttgnttanactttttggtacccagnnan

SEQ ID NO: 36 - DNA, 119 bp, Homo sapiens
aaagccatcattatatattaaaagagcagaggtaattctgtcttctccggttgtgcagcacgatctgctccagctcgtcatgccagggcccggaaaacctccaccttctcccggtacag

SEQ ID NO: 37 - DNA, 342 bp, Homo sapiens
ccactttctttcccacctgggaaggcggcatctatgacttcattggggagttcatgaaggccagcgtggatgtggcagacctgataggtctaaaccttgtcatgtcccggaatgccggcaagggagagtacaagatcatggttgctgccctgggctgggccactgctgagcttattatgtcccgctgcattcccctatgggtcggagcccggggcattgagtttgactggaagtacatccagatgagcatagactccaacatcagtctggtccattacatcgtcgcgtctgctcaggtctggatgataacacgctatgatctgtaccacaccttccggccag

SEQ ID NO: 38 - DNA, 444 bp, Homo sapiens
aaatgaagtctcctgaagacctctcttctggcaaaaaaaacacgtatcagactctgggaaaacattcagacccacttctagctattactgaaataaatgattagaaagttacgttggtgagccgaagttaaacctaaagctatcccctggatctttctagcaataaacccatgttgaacctaccatgaaaactttcattcactgtgcttttggttacgttgcttcctgattagtcattaattttaatgaggttttttccttgtgttgagtatgaatagaccttacagtttgaggatctctagaattccctgaattattggaaagacattcatgactcccagtgtgactagttaagagccccagggagcctgtgaagactagaatctacaagtaacctgcactaagaacgaaattcagtaaaggagactcaagcttagctcctgg

SEQ ID NO: 39 - DNA, 372 bp, Homo sapiens
  misc_feature (1)...(372): n = A,T,C or G
aggtcactggaatcaatagttaacaagatggttgtcctttggggccacaggtgtgttgctaacctccacttttcttcctgatttgctttgctttccggggtttgaggatggtgtagtttacgtacactgtatactgatctgacaggaaggggacatagaatgcccgcagcagctttgaagatctagaagcatcaaggaatggtctataggccaagctgatccattcttctttattggatgaatattttggctcccggggtgtttctctcatggtgtccaaatccactaaataatggcatttactgatatcaatatatctggatggctcttctagattctggtcattcatgtcantaggaacaatccgggtgg

SEQ ID NO: 40 - DNA, 288 bp, Homo sapiens
aaagcaaatacaaaacagaacagaggattcaaaccgcaagtatgggagatttaggccctgcagaggcagaccattccttagtatctcacaaagcagagtaatactggaggcagagtagggggtggttggagagcagttagtacaaagaggcagaacagtgtctggtttacttggcatacacagaatctgcactgccggttccagaactgcaaagttggtgaactacaggagatgtgggtatttagactccaaagtttatactgagctcagtgcctgggaccgctccag

SEQ ID NO: 41 - DNA, 682 bp, Homo sapiens
  misc_feature (1)...(682): n = A,T,C or G
cctgagaccctcaacagtgctgtgtgtacagaaggcccccagaatccacacaaaggggccgcctgaaacctagagcatttgtgaaggaggaaaatggaaggaacaactggatgttgtaaatgtttctcatctggccttaaaatccatgaaagctggaaaatcacaaggcatctgtgcatatactggtggattttaatgagagtcctgtgtttggagcaccagaaataaaccagcttcagaagcaaagttaacaggaggaggaagtagagctagagatggaaggagacccagccagcccgggctccagtgacatcggctggtacacgcttttgtttgcttacgcttgttgaactgagtttttcatatgtaactaacgaatactggcacatgatctgaacgtctatgacactctttcgagcttgacacagtgaagaacatagaaggagactcacccatctgccagggtcacagaatgatcatactcaanattttctggggagtcaatggcaaatttnctgggtattttacagatgaagaaggacttaagaaggtcttgggacccnantcacggacaccccttactgatttttggaacttgtntttggacttcgccgnacnccttaggngaattcanaccntgggcgttcttatggatcccactcgnccaanttgngtaatatgg

SEQ ID NO: 42 - DNA, 346 bp, Homo sapiens
  misc_feature (1)...(346): n = A,T,C or G
aaagccaactcttctatataatcagtttgatgatctgaattagaaaataccgctggataatcatgttcttgatacacatttcctttttttttgagatggagtctcgctgttgtccaggctggagtacagtggcgcgatcttagctcaccgcaacctccgcctcccgggttcaagcgattctcctgcctcagcctcccaagtcactgggattacaggcgtacaccaccatgccgggctaatttttttatgnttaggcagatggggnttcnccatgctggtccgggctggcttgangcccntttcttnatagggccatnaggggaaaagngcttgcctaaccccccat

SEQ ID NO: 43 - DNA, 410 bp, Homo sapiens
  misc_feature (1)...(410): n = A,T,C or G
ttcaaagaatcacttttaggcttacaaaaataaatatttgtcaaaatgttcaataaatattacataaaactagcagcaaaaagtatctagaaatctgtcgtgtgcaaatagttttcttcccaactatcattcccatggtcccaaataaattttagaatctagtcccatccccttcctagacaagctgcgttcaacaatctccaagagacaaagtaagattggaagtttaaggacacgcacacaagacatatatataaaatnctctgaatgtgcaataaaangaagtnctttgttaaaaagttatngggncnaaatgntccaanggccttaaaccttagacctnattggnaattngccncccttaaccaatggaccctcgaattcttgntcaagnggnaccttccttcatt

SEQ ID NO: 44 - DNA, 457 bp, Homo sapiens
  misc_feature (1)...(457): n = A,T,C or G
aaataatacagaacaattaaagctaaccaagtgcaacagataaataagcctgccagttatacacataactttataccaaccataattcagccagtcaaaattccaaaaacaatccaaataacttccaacatactagcggtcaaactaccgaataaacttgatgcagaccagtattcccaagttgcaatagtatccaatgactttgctgaaatgcataaaatggacaagcctaggtatctgcgcaaccagcaggttttttttttgtnccaaggctngagaatgcctggtaaaagcttgccagaaaactctcaaaaggaactggttncttgcccttctttttctttaananacttnaaaattttgaataaaaaacccttcctggggttttggaacaatttctaaaggggttncccanattncctcccccaaaaaaatttttaagcttcctttggggagg

SEQ ID NO: 45 - DNA, 245 bp, Homo sapiens
  misc_feature (1)...(245): n = A,T,C or G
gaagactattctcagcaatcagactgtcgacattccagaaaatgtcgacattactctgaagggacgcacagttatcgtgaagggccccanaggaaccctgcggagggacttcaatcacatcaatgtagaactcagccttcttggaaagaaaaaaaagaggctccgggttgacaaatggtggggtnacagaaaggaactggctgccgttcggactattttgtagtcatgtacagaacatgatcaaa

SEQ ID NO: 46 - DNA, 381 bp, Homo sapiens
  misc_feature (1)...(381): n = A,T,C or G
aaatgagggtttaataatcttaattatctaccaaaagtagattacgacgcatgaagatcacataaaatgaacttcacttctcagcatcacaaacatttggaatacaaaaagtccagggatggatattagaagtaagaaaagtacaaaagangtttgcttagaaataacaaaaaattaaaaaaaaaaaaanggatcccccntccccccaatcccnataatcggggnntaggcaaccatcggggtaaagnctcccttttgctcactcctgtntaanaatgnggngcccacnnaactggttttttncanttnttgtgngccanaaaaaccctcncnccctngcccggggggnggncgtttnnaaaagnggcnaaatntccnagc

SEQ ID NO: 47 - DNA, 364 bp, Homo sapiens
  misc_feature (1)...(364): n = A,T,C or G
ccgggcangtaaatttgangtggtcttaagaataacaaatgaacagaatnccaaatttttgaaataggtgaactgctgcagttacaggtatacatttaggaaaactgtatagctcttacaagaccagcaatgtaactttattttngcattnattnaattgaaaatataaacaataattaaaaaataaaaagaaaatacagcataataaaaaacatacgcttctcaattaaatgtactggatacatataaattttaagggaanaagcnaaaaangaaaatgattgatntttaagtgcagactgactacctanacaaaaaaaaaaaaannttnaaaaaaatttnattaacccccntnnactttttg

SEQ ID NO: 48 - DNA, 486 bp, Homo sapiens
  misc_feature (1)...(486): n = A,T,C or G
ggcggctaccagtgtaaagccagagctgaggttcttgatagtccacaatgggtgaaccacagcaagtgagtgcacttccaccacctccaatgcaatatatcaaggaatatacggatgaaaatattcaagaaggcttagctcccaagcctccccctccaataaaagacagttacatgatgtttggcaatcagtcccaatgtgatgatcttatcatccgccctttggaaagtcagggcatcgaacggcttcatcctatgcagtttgatcacaagaaagaactgacaaaacttaatattgtctatccttattaatttctttgggaccnttcagatattttaattaanggagcccctgggagtttaaaacgagaaagagaaactngaaagatcttaaagctggttttttgtacacgtgcatcatcttatnaatgaataccgnccccaccaagcnagaanaaccttgaantcatgatggagggccagaaac

SEQ ID NO: 49 - DNA, 397 bp, Homo sapiens
  misc_feature (1)...(397): n = A,T,C or G
aaattgtattgaacagggcatataaaatgcattctgtaccctgatctggcatatagcttcaaaactgcagtggcgagtgtccatctcttagttagctaccttaactgtccacccttactacctgtgggatcgttacctggtttgtcttctctgtgtcctggagcaaagccagttcctaaaactaaaactccattctagtcttgggaagaaaagtttctactcagaactggggaaggagtggaacttatgacttgggcctctaggctgtctctgtcccctcagctncccgacatgcatttactctctgccgggggtctgcagtnggttncaaccctaccctctnttttggcctnnagnctttacaacccaaggnaagaagggcctngggctcttccct

SEQ ID NO: 50 - DNA, 92 bp, Homo sapiens
  misc_feature (1)...(92): n = A,T,C or G
cgcgtgaagaggaagaatgccaagaagggccagggtggggctggggctggagaccgacgaggaggaggattnagtccacttgtnnctctggg

SEQ ID NO: 51 - DNA, 306 bp, Homo sapiens
  misc_feature (1)...(306): n = A,T,C or G
aaagtatatggaagatgtgcaaaggttatatgcaaatactgtaatattttatataaatgacttgagcacctgcagattttggtatccctgagagttcctggaaccaatccccttcagataccaaggaatgactgtacatgtttggtagaaaactagttgtctctacctagtctccattctggtcacttctttagtttcctaatttcagagtaaggccantctccttctgtgatggttaattttgtgtcaacttnantgaaccaagggatgcccagatacctggntaaacatttttncacgtngtgt

SEQ ID NO: 52 - DNA, 541 bp, Homo sapiens
  misc_feature (1)...(541): n = A,T,C or G
aaaatgttacacaaatttctttatgataggacttctcagagcttttagcattctaatgcagagtggaaatgtgaatggcaggattcagtataatcagcacgtcccaactctatctgaacacagaactcttgttctgcatatcatcgatttgcacaccctggaacaacgtttggtagaaatcaacttgggaaatgttgcacagcatgagtgatgaatacagctaagttaggatcaaagtacaggcgtatctcgttttactgcacttcactttactgagcttcatagatattgtgcttttacaaattgcacgtctgtagcatcctccnttgacaantctattggtgncatttttccaagaggatatgntnacttcatgtctctgggtcacatgtngggnaattctcacaatatttcaaanatcattattattttatcttgttccggtgacctgngggcangcgagcttttatgtnactatngtatgattnggagggcccgcgnntnacaaccntttnnaatgggtagctgtatttataaatng

SEQ ID NO: 53 - DNA, 321 bp, Homo sapiens
  misc_feature (1)...(321): n = A,T,C or G
aaaaaaatccaaatgctggcattgtccagaaaaatttaacaggtttatttataattattataaagttgaaccgctgaaacttgttcactgaaacattttaacttgcattaatgctttacgtctccgcatttatattaaaaattcacacacaaatgaaaatggaaaaactgccaatacctgatttctgncccctatttttccactcgcaatcatntacttangtaccttttgaccccatggaaaaaaaannttaaccgttcaggactncccattaccggaagaaaaaaaatttttttttttttggnaaaaaaaaaagttccc

SEQ ID NO: 54 - DNA, 547 bp, Homo sapiens
  misc_feature (1)...(547): n = A,T,C or G
aaaaatgtaacaaacatctaaatatctgacaataaaatctgaaatgctgtaacttcaacattaactgcaccatccaaattcttgtgacttacgcatttttgcccaatttaacctttctgatgttcccctgcccccagacaccataaatgcattgtaattttgaaaatatctgccaactacacactgaaaattttaacctgatcaattgacataatataaaatctgtcccaaagcactgaaacaagaaaatctataccatcatgctacagacgtacttagaaaacttaaaaggaagaagtaaatatcagctcagtgatttatnatgaagctaataaaattcaaggccagtattcttaagtgtaatgaacattatttgaacattcacacatgaaanggtaacaaagggctatgaacttggggtaactttaaaacgtttcagatgtccggagttcaccanatgtaattggattcaggtgggatnccgncgctcctcggcctttttaagtgaangcgtgtgctgcctgactnggcgcctgcttggcctcag

SEQ ID NO: 55 - DNA, 439 bp, Homo sapiens
  misc_feature (1)...(439): n = A,T,C or G
aggagacagccagaagcaagcttttggagctgaaggaacctgagacagaagctagtcccccctctgaattttactgatgaagaaactgaggccacagagctaaagtgacttttcccaaggtcgcccagcgaggacgtgggacttctcagacgtcaggagagtgatgtgagggagctgtgtgaccatagaaagtgacgtgttaaaaaccagcgctgccctctttgaaagccagggagcatcattcatttagcctgctgagaagaagaaaccaagtgtccgggattcagacctctctgcggccccaagtgttccgtnggtgcnttccanaagcagggngtatgctcacattcatggcctntgacancgnangaagaagtggtgtngatggagcngacgtccctaatgtccggcttgagagccccacncccgcgctcctgcc

SEQ ID NO: 56 - DNA, 339 bp, Homo sapiens
  misc_feature (1)...(339): n = A,T,C or G
aaaaaaatcaacagtgttaacagtgggtgggtatgtttccagacccctcaattcactcatatgtacagacaggattgacggggggaatccctaaactttttattctaacaagttttatttatttattttcttttttgacatggagtctcgctctgtcgcccaggctggagtgcaatggcgtggcctcggttcactgcaaccttcgcctcccgggtttaagcaattctcctgcctcagcctcccaggtagctgggattacaggtgcatgctactgcgcccggctaatttatgtatttttattanagatggggttcaccatattggacctcggncggacca

SEQ ID NO: 57 - DNA, 432 bp, Homo sapiens
  misc_feature (1)...(432): n = A,T,C or G
ctgcccaagggcgttcgtaacgggaatgccgaagcgtgggaaaaagggagcggtggcggaagacggggatgagctcaggacagagccagaggccaagaagagtaagacggccgcaaagaaaaatgacaaagaggcagcaggagagggcccaccctgtatgangaccccccanatcagaaaacctcacccagtggcaaacctgccacactcaagatcttctcttggaatgtgnggatgggnttcaancctggnttaaaaaaaaaggattatntngggtaaaggaagaaccccagatntactgtgccttcaaganaccaatgttcngagacaaactccagacctcggccgcgacacctaaggcgaattccanacactgcggncgtctagtggatcgactcgtccaacttgcgtatctggnatactgtttcttga

SEQ ID NO: 58 - DNA, 217 bp, Homo sapiens
aaaatcctgattttggagacttaaaaccaggttaatggctaagaatgggtaacatgactcttgttggattgttattttttgtttgcaatggggaatttataagaagcatcaagtctctttcttaccaaagtcttgttaggtggtttatagttcttttggctaacaaatcattttggaaataaagatttttttactacaaaaaaaaaaaaaaaaatat

SEQ ID NO: 59 - DNA, 566 bp, Homo sapiens
  misc_feature (1)...(566): n = A,T,C or G
cctacacgccgccgcttgtgctgcagccatgtctctagtgatccctgaaaagttccagcatattttgcgagtactcaacaccaacatcgatgggcggcggaaaatagcctttgccatcactgccattaagggtgtgggccgaagatatgctcatgtggtgttgaggaaagcagacattgacctcaccaagagggcgggagaactcactgaggatgaggtggaacgtgtgatcaccattatgcagaatccacnccagtacaagatcccagactggttcttgaacanacagaaggatgtnaaaggatgggaaaatacagcccaggtcctagccnatggnctggacaacaaagcttccgtgaaagacctggagcgacttgaagaaagattccggccccatagaggggctggggtcacnttctggggcctttcgtgtccgaaggccagncacacccaagaccacttgggccgnccnngggccngcacccgnggggtgntgtcccaagaagaaaataagncttttaggacctcccngggcggggcttngaaagggngatttncaggccact

SEQ ID NO: 60 - DNA, 234 bp, Homo sapiens
  misc_feature (1)...(234): n = A,T,C or G
cctgggtgcctactctgggagcagcgactccgagtccagctcagacagcgaaggcaccatcaatgccaccggaaagattgtctcctccatcttccgaaccaacaccttcctcgaggccccctagtttctccgtccctacacagggagctcctccccaagggtagatcggaccgttcatgctgcctataggcattatgtccctcaaaaaaaaaaactccttngcctgcatcctgt

SEQ ID NO: 61 - DNA, 375 bp, Homo sapiens
  misc_feature (1)...(375): n = A,T,C or G
ccaccatttcccctgcatcgtctctcctacgtaatcagtccctgatgaactctcttcccataaaaatccctgtgtcctaaagtcatggcgtgctctatttcatggtcatttgtagagcacagcagcactgtgcctgtcaggaaaagtgtgtgctaactgcaataagcatgatgactgccatcacggttttgttattctctgtccacctccatggnctctaaatcagacaatctttaatctgaaaaggcagtgtccttattcctccaggaaactggatagaaaagctcctcatctaatgaagcaagccctgtcatcttactgattctttcccagaccacangtgnaaaggggccttcggccgngaccaccgctaaa

SEQ ID NO: 62 - DNA, 455 bp, Homo sapiens
  misc_feature (1)...(455): n = A,T,C or G
gggtgggaagagaagaaatagcagagcctattttggtgaggttttttgtttttaagtcaaagaagactcagtatgctttccctgaggaatgaaaaagggattgaggagttgcctgactcctgggtgggtggggtacaggcagttaggtgctgaatgaagctgccatccttgctgcagcttctaactggtaaaaagatccagggatggagatgggaaggttagaaaggcagccctcacctctgaggacanangccggggtccaggcccctgggcgcaaaggtgcctcatagcatagccagcatttnagtnctcncaaacctactggccncatttngggctnaggggtggancctgctccgggccggccccttnaaaatggcgaanttccancacncttggcnggtccgntgccnattgggatncccccctcccgtacccannnctttgggnttnat

SEQ ID NO: 63 - DNA, 560 bp, Homo sapiens
  misc_feature (1)...(560): n = A,T,C or G
ctgacctgactttgctttaggtcattcttttttatgccagcactgtttgaaagtgcatgtcaagcggctagctccacatttggtcttcgaaagggaaacgcatgcagttaaaacgtaatgtacatgatggaattgggaggatcatagtctcagtttccccccctctttctcccatctaggagacctccgtggactgcagcaaaattaaaaataaagcacagacaacagaattattcttcactgagagagtttaatacgcgtttctaacaccatctatacttgctttgttgttcttgaggtcatcaacacacattctgggtattccagactanaactcttctggttgctaactcagttttaagaagatgaaagacataactagacttaccgtatttcagtagtttgctctttaatttttcccttactcttaatttcaggcgacctccaagaaaggnatcaagtccgactgggataaaccagatggagaaangtcacagatttaaggaaaaaaagcagatcttgcccacccagngaaaatcancattganggcaacaaaang

SEQ ID NO: 64 - DNA, 105 bp, Homo sapiens
  misc_feature (1)...(105): n = A,T,C or G
ttttttttttnatcctgccacaatntttttaattncgtncaaanatntgacntgtcacccagggacccatttnacccactgntntgtttggccgccagtnttttg

SEQ ID NO: 65 - DNA, 427 bp, Homo sapiens
  misc_feature (1)...(427): n = A,T,C or G
aaaaactgactaggtcaaaaatagttacgcctgcaggttgacctattcagactttgccaaactcctccaagttcaatataaattgacgttttcagagtacaaagtcaattttacggaaacgctgttcctccttttccatggagccaatctgggtaattttttcattaaaattcttcttctgcctgtttgctgcggaactctttgagctgctgtagccgctcgatagtttcagaaatggtgcgttccccgtggaccttattgtctcttgtgcggatattaacagngccactgattttctctttttcccaaccacctaaaatgganggtatactgnggcttactgngncantttcgaatcttttttattcaatggtaccagccctgggatcccagaatcaaantggtcttggcccttggaaattttggg

SEQ ID NO: 66 - DNA, 362 bp, Homo sapiens
  misc_feature (1)...(362): n = A,T,C or G
aaatgacgaaactcagcggaaatatattcagggattgaagaggttaatgaccatttgccagaaacactttcctacagacccatccaaatgtgtggagtacaatgcactgtgagatctgtgtatggtgtgttaataacaataagaaacttagggaagcaggctgtggacttctggaattaccaacaggaatgaggaaagaagaaaactggagtttccagtctctgagttctacctgatgtaactcttgattggttttaagaactttgttggccttcatttcatatctgactgcaagctgatttttctttcttgctttcattttaattangtcccaaaattaaagtttttaccttgccccgggc

SEQ ID NO: 67 - DNA, 357 bp, Homo sapiens
  misc_feature (1)...(357): n = A,T,C or G
cctgacgtttagagaaggttacaaaggcggccaggatctgagtatttccaaaaagctctggaggcagcattgaggtttccttccagttgaatcactgactttaggtcgactggggtactttgggttttttgggccattttttgggggtgtgggaagcttttctcacagatttactacgagnggngaaaaacttggcctctggcttttttggantctngntcgcatctttcttccncagcnaagganttttttccttcactgcctctnctttgatnnttagnttgntnctctgggcttnttctctnggggccncnaaactcctncagcttttngggggtnttcagnatgcttggcttg

SEQ ID NO: 68 - DNA, 395 bp, Homo sapiens
  misc_feature (1)...(395): n = A,T,C or G
ctgacatttattattttggtttcattttcctttttgcgtctttatgtttctttcgacaatccatacgcaggttggttgttctggcctcccaagagttcctgctcatattacttcctactcctctccagaataagtcagaaccttgaagtcgttcatcattcttagagaaaaagaaaaatctagtggtctctttctcaagtaatgatgcttctctgaaaagaaagggacaaangagagagaaaaataggtnttggttggnttaatttcaatatttaagaagaaatatttacattcnaanacanaaaatncacnattntgttaanattatatccttnttcagttnccccccttcaancccnggnggancggaagnactctttaantntatcntgcct

SEQ ID NO: 69 - DNA, 363 bp, Homo sapiens
  misc_feature (1)...(363): n = A,T,C or G
ctgggaacaactttcttcaaactacctggtggtgaacttaacccaggagaagatgaagttgaaggactaaaacgcttaatgacagagatactgggtcgtcaggatggagttttgcaagactgggtcattgacgattgcattggtaactggtggagaccaaattttgaacctcctcagtatccatatattcctgcacatattacaaagcctaaggaacataagaagttgtttctggttcagcttnangaaaaagccttgtttgcagtcgctaaaaattacaanctggtagctgcaccattgnttgaaatttggttgacgatggcaccnnggntttgggacccctnnnttttttagtnttccctt

SEQ ID NO: 70 - DNA, 269 bp, Homo sapiens
  misc_feature (1)...(269): n = A,T,C or G
cctattctcttgttgaccagggtcaagacctgctctgtgatgcaggctaccttcatcctgacttctgcggctggatccttggtgatggagaagtccagccgaacatagatgataacggngaagaacaggatgtagaaggccgccaccaccagcaggggctcctgcagnatgagcaccttgttgaacgtgnagtggaccacaatgnnctgaatgggctgntctaccanatntttcttgtagggcnacantcacnnggcggccaaatgtgg

SEQ ID NO: 71 - DNA, 546 bp, Homo sapiens
  misc_feature (1)...(546): n = A,T,C or G
aaactaaatatataaatctataatgttaaacatatgttcattaaaagcatagcactttgaaattaactatataaatagctcatatttacacttacagcttttcatttgatcaggtctgaaatctttagcacttaaggaaaatgactatgcataattatacctgaccatgaaaaaaataagtacctcaaatgcatgcatttgcactggtgattccaactgcacaaatctttgtgccatcttgtatataggtattttttacatgggttgacatgcacacaacaccattttcattcagtatgaaccttgaggctggtgccatttttcccttaaccaaaccaacctgaaggtgacctcgaaacttgtttcataaatctttcaaaagttgttttacatcaatgttaaaatttcaaaatgctgcanggcaatttaatgtataaaatattagtaagaaaaantatgtatggcatacttagtagaatagatcacaacatacaaattcaatcaatgcatgctttaggtgtaagcatgagaatgnacatgtttntg

SEQ ID NO: 72 - DNA, 395 bp, Homo sapiens
  misc_feature (1)...(395): n = A,T,C or G
ccagtcagtgttcatgtctctcaccagtgcctggagggtccccagccaaggaaagaactggtcagttcctgccagcagcttgagctggaatgccctgggagggtcagtagagggtggtcacttgaggagcttcacagagaggcggatgtcaacatcgcagaggaagatgtccatgaggtcatggcctgcctcctgtgctatctgggagatcacgtggcccttcggaccaatcaggagtttctgagggtatgtgaaagagaaggaagccaggaatgatggcacatgcctgtagtcccagctacttgggggggtaangtgagaagatcctttgagcacangantttgagtccacctgggtaacagtgcgacccctctttacctcngcgcgaccacgc

SEQ ID NO: 73 - DNA, 527 bp, Homo sapiens
  misc_feature (1)...(527): n = A,T,C or G
aggtaaaaatgggncncaaantcgnggtggaccaaacnaatccacatttatttattgatttttcgttagtttaaatccttgaggggtacagcatcactcggattctgtgtccaatggccttagcaggaagattgcttcggaatttggcacgaaccatgccactgtttccatgggcccgagttacttttccccagatgactctggttttgtttggtttgccgccaggagtgactgtgttgttctttgctttatatacataagcgcatctcttgcccaaatagaattctgtttcatctcgggcgtaaaacaccttcaattttaagaaaganctgngtgctcccttgggttccggagacccccttatgccagcaaaaatggccttggacccanccttccagaatagtccttttanaagtcccgttcccacangactgccgggcggccgtcgaanggcnaattccacacacttnggggcggtctannggnatcgagctcggnnccaacttggcgnaatatggncatantgt

SEQ ID NO: 74 - DNA, 557 bp, Homo sapiens
  misc_feature (1)...(557): n = A,T,C or G
ccaagccaaggaaaccattcccttacaggagacctccctgtacacacaggaccgcctggggctaaaggaaatggacaatgcaggacagctagtgtttctggctacagaaggggaccatcttcagttgtctgaagaatggttttatgcccacatcataccattccttggatgaaacccgtatagttcacaatagagctcagggagcccctaactcttccaaaccacatgggagacagtttccttcatgcccaagcctgagctcagatccagcttgcaactaatccttctatcatctaacatgccctacttgggaaagatctaagaatcttgaatcttatcctttgncatcttctgttaccatatggtgttgaatgcaagtttaattaccatggagattgttttacaaacttttgatgtgggtcaagttcaggtttagaaaagggagtctgttccagatcaatncccnaactgtgcccangcccaaaggagacactaactaaaggagtgagatagattttaangggaaacatttttccaagtcttggcatntttnaacc

SEQ ID NO: 75 - DNA, 552 bp, Homo sapiens
  misc_feature (1)...(552): n = A,T,C or G
aaaagcagcttcagctcaaacagcaccagtgctacatggacagcatggcagcgcagccgctccatgcggaaaagaaaggcaactgctgcttcaaactgcgctgtcaggaacaggacttggaagtagaggaagggttgctggttcaccgtaaagtgggactcgccatagtcttccaacaactgcttctggaactgtgagagagtgagcctgtcttgtggggagctggtgccatcgtcgtcaaaacacacttggttcaacttcagccacaggtaatcctcagttttgtccggcacttcactctggttgtcggtgaccgncacattttgccaatgatacagnncacggnccgcttgtagggatctgtnttgttccttgagngccctacggtnatgcngccggagcttgttttccgtagctggggacaatcttctgccttcntgtcatgtctcctggaaccangttttacctngnccgngaccacgctaaagggcgaattcaanacactggcggccggtnnctatggatccnaactcggnnccaagcttgggggta

SEQ ID NO: 76 - DNA, 451 bp, Homo sapiens
  misc_feature (1)...(451): n = A,T,C or G
ggaacctgccatgaacccaacaaatgccaatgtcaagaaggntggcatggaagacactgcaataaaaggtacgaagccagcctcatacatgccctgaggccagcaggcgcccagctcaggcagcacacgccttcacttaaaaaggccgaggagcggcgggatccacctgaatccaattacatctggtgaactccgacatctgaaacgttttaagttacaccaagttcatagcctttgttaacctttcatgtgttgaatgttcaaataatgttcattacacttaagaatactggcctgaattttattaacttctnattaaatcacttgagctgatattactcttccttttaagttttctaagtacgnctgtagcatgatgggtagattttcttgtttcagtgctttgggacagattttatattatgncaattgatcaggttaaaattttcaa

SEQ ID NO: 77 - DNA, 136 bp, Homo sapiens
gtgaagaaggcagctctcactcaggcaaagagccaaaggacgaaacaaagtacagtcctcgccccagtcattgacctgaagcgaggtggctcctcagatgaccggcaaattgtggacactccaccgcatgtagcag

SEQ ID NO: 78 - DNA, 546 bp, Homo sapiens
  misc_feature (1)...(546): n = A,T,C or G
ctgtgcaagatgcctcagtgtgatgcaaagactctatattggaaaaattacaacttggtctaaaaacttattggtgttgatatttttaatccaaaataaatttataaaaaaatcctttaatggactatttcagtttaatatacagtaatacactgtagataaagttaatattccccccactaatttaatagggattgatatcaatgtttctgatcactggagaaataaaaactaatgtggacctttgatatccatggcataggaggattcccacagtttatcctaagaggatctggggaatattaaatattctaattccagnggcttagncaatatgaattttaagtacaangatatttcaaaancagnggtttggaaaaaaaaantaatcaaaacccataatcacatctcttgtggataacaatattaatataactttttacccacccangacttgcctgtncaaactcagaactgaaagnttggntctgtagacttctggtaacaatctggcaaacactaaatggagngtggncttatctnttt

SEQ ID NO: 79 - DNA, 545 bp, Homo sapiens
  misc_feature (1)...(545): n = A,T,C or G
aaacatggataaaagtattacatgggtccactgttaaaacagacaacatgtggcaaattaattctggtatcatgttttccaacaaagcttagaaaataaaggtgttgaggtggctttggactaagtttaatagtcatctcctctgctgacaacttctttacatgttggacgcaacaggatggtatgttcaaattgcgctgtatatgatcctttaatgtcacataatggtggatatggatctacaatgcccaagtcacacagattcttcagagccatcaagtatttactttctcccaagcgatccanccatntggcggcagaangcaaagggttccaaagttttcattgatgacatttaacaagtgttttgttcttggaagccttattgggcacatgtccaacatcaaaatttttcatgtaatgtgaacattccatatcatcatgaacaacaccttttcctgtactaccaaatgtttcaattgcatatacttctccttcctncattcttgttggctnccttctttnacaatcngnacntgttttcc

SEQ ID NO: 80 - DNA, 547 bp, Homo sapiens
  misc_feature (1)...(547): n = A,T,C or G
aaaaatggggcacaaatacaggcaggtaagagacagacagctctcatccctgcactcttggctttctgagagatatgaccccaaggtcctggagtctagctgctgcttcctcctctgggaaatagaggagtgatattggtagtacctagggcatagcactgctgggacaattcagtgatttggggactgatctccatatcaagatgacctgatcctgtctgtgtgcgggacagtggctagcacggagcccttgttangcccgcctaccatctgacccttctcaaaccttcccgtctgaggacatctgcatgcaccacttgncccttccaatggctgtcttactctggatggccctgacacctggagaaggccanacaagccaagtgggttntctaaggacctttgtgaattcntaggacctcgggccgcnaccacncttaangggcnnaattcccagnccacctgggcnggncnggggncctaattggaatcccgaancttcggggncccaancctttgggngnaatccatgggtcnattancttgg

SEQ ID NO: 81 - DNA, 515 bp, Homo sapiens
  misc_feature (1)...(515): n = A,T,C or G
aaagtttgtgcctgtaatacagtccgtgatatactggaaggcagaacaattagtgttcaatttaaccagctatttcttagaccaaataaagagaaaatagactttcttcttgaggtatgttcaagatcagtaaatttagaaaaagcttcagagtctttgaaaggaaacatggctgcttttctaaagaatgtgtgtctggggttggaagatctgcagtatgttttcatgatttcttcacatgagcttttcattacattgttgaaagatgaagaacgaaagctacttgttgatcagatgaggaagagatccccttgagtaaatctgtgcattaaccngnaacttcatttnatgatatccccagctcagcaaggagtcaacantgggcagttagaagcatcaactnatattggccagtgggatcctggggaggattagacaaantttaatcgaattaccatgggtgttgactttcaganccgcccanttctgggacaggggcntattaagnggggaaa

SEQ ID NO: 82 - DNA, 192 bp, Homo sapiens
cctttccccattgctcctttccccattgctcaatggattccatgtttctttttcttggggggagcagggagggagaaaggtagaaaaatggcagccacctttccaagaaaaatataaagggtccaagctgtatagtatttgtcagtatttttttctgtaaaattcaaacacacacaaaagaaaaatttattt

SEQ ID NO: 83 - DNA, 572 bp, Homo sapiens
  misc_feature (1)...(572): n = A,T,C or G
ctaatacgactcactatagggcaggtgcaggcagctaggtgatggcaagagatgttcacttgaagatcttgccctgattgaaggctttgcccacatgctggaaggccccctcccaggaaaagtactctcgaaccagcgtctgggtctcctcgctgccaggatccagtttccgccatgtgtatgactcgtagtccacctgccaatctggactcagcggaaaggcaagctcctggcctcggaagacccagactccagaaatggagctgctattgttggttccaaaaaggatgacactggcgaaggcattcttcctcagcttgtccagtcgctggaacattncagtgatgannatgcagctcatgaaggtctgagtgagttcttcagggaagcgatactcttgagtaccacagggaccagccgtccttatcaaagtgctcccagaaatatggcagtgccacagagagtgngtcctcattggagtacttgcgcttaaattcatccaacacaaangtctcttgggcagtgaacgaaggggtncttgccttgggncacagccacngctgtccattatc

SEQ ID NO: 84 - DNA, 588 bp, Homo sapiens
  misc_feature (1)...(588): n = A,T,C or G
gtgaagcaacctttaggtaccaaagtcattcccaccatgcagtcaccttgtcattacttacacttttcttctttttcattttacagtaaaaaagtcaagaacatgtaaaaactgtggcttttctggaatggaattggacatagcccaagaacagaaagaaccttgctggggttggaggtttcacttgcacatcatggagggtttagtgcttatctaatttgtgcctcactggacttgtccaattaatgaagttgattcatattgcatcatagtttgctttgtttaagcatcacattaaagttaaactgtattttatgttatttatagctgtaggttttctgtgtttagctatttaatactaattttccataagctattttggtttantgcaaagtataaaattatatttggggggggaataagaatatatggactttcttgcaagcnacaagctattttttacctgccccgggcgggccgctcgaaagggccgaantccaagaccacttggcggcccggtactagtnggatcccaactcgngaccaancttngcgtnaacatgggcataagctggcgnnctcccggaa

SEQ ID NO: 85 - DNA, 399 bp, Homo sapiens
  misc_feature (1)...(399): n = A,T,C or G
ctgctctgtgctgggcatctgtctactgctcagtactaccaagggttgtatgaaatcttggaattggctgaggacatggaaattgacatcccccatgtgtggctctacctagcggaactggtaacacccattctgcaggaaggtggggtgcccatgggggagctgttcanggagattacaaagcctctgagaccgttgggcaaagctgcttccctgttgctggagatcctgggcctcctgtgcaaaagcatgggtcctaaaaaggtggggacgctgtggcgagaagccgggcttagctggaangaatttctacctgaagccaggacattggtgcattcgtcgctnaacanaangtggagtataccctgggagaagagtcggaagcccctggacctgccc

SEQ ID NO: 86 - DNA, 224 bp, Homo sapiens
ctgtacaggttctctgttcttcagggtcattttcacagctttaagatgtgtattcatgctgacatccacacctgtgattgttccatggacctgtgttccgttcttcaattcaatggttacagtttcatgactcaatttcatcaaaaatctcacgagcttcatcctagcggcgccgtcaccctctgggtccgacagcacacagaatccttcaaccgaacactgac

SEQ ID NO: 87 - DNA, 511 bp, Homo sapiens
  misc_feature (1)...(511): n = A,T,C or G
caggnncaagagtttccttnaccatnagacactgtactatgacacagaccctttnctcttctacgtcatgacagagtatgactgtaagggcttccacatcgtgggctacttctccaaggagaaagaatcaacggaagactacaatgtggcctgcatcctaaccctgcctccctaccagcgccggggctacggcaagctgctgatcgagttcagctatgaactctccaaagtggaagggaaaacagggacccctgagaagcccctctcagaccttggcctcctatcctatcgaagctactggtcccagaccatcctggagatcctgatggggctgaagtcggagagcggggagaggccacagatcaccatcaatgagattagtgaaatcaccagcatcaagaangaggatgtcatctccactctgcagtacctcaatctcatcaactactacaanggccagtacatcctcacactgtcagaagacatcgtggatggacctcggncgcgaaca

SEQ ID NO: 88 - DNA, 114 bp, Homo sapiens
  misc_feature (1)...(114): n = A,T,C or G
cctttcacaactaggactgagaatgtatgtaaaagttctgtgacagtacagaaggaaaacaactttttatgtatagcttctaaaaggggaaaaaaaaaaaaanaaaacccnttt

SEQ ID NO: 89 - DNA, 609 bp, Homo sapiens
  misc_feature (1)...(609): n = A,T,C or G
cctttatggatgaaagtacccagtgcttccagaaggtgtcagtacagctcggaaagagaagcatgcaacaattagatccctcaccagctcgaaaactgttgaagcttcagctacagaacccacctgccatacatggatctggatctggatcttgtcagtgactttatgagagtttctgccacaaggtgcccaagaggagaggaatgggaagagtgccccagcacgtggtgactgcgtgatttctgctcgttgcctttgaagataactggcaggactgactgtagaacactttgacttttttcaaaaagtgatggaatttgtacatccaaatgaatattgtatagacaattttcccaggaatgtgcaaaatgcttgaaagttcaaacttcttttttgaaatgatcttcagatccagtggcccattcttttatctttatcctgtgaaggtggttttcaaggtttgaaacaatccaaaaatcatttaagaaccaagtctaangaacattttagtggaccttgcccgggcggcccctaangcgaaattccaccncacttgnggcngttncttangatccaacttcggnccaacttggcgtaatcatggcctag

SEQ ID NO: 90 - DNA, 594 bp, Homo sapiens
  misc_feature (1)...(594): n = A,T,C or G
aaacttcagctcagtttcttaaccaagaaccacgtcaaccctccagggttgtggtttgtatttttgcctttaagcattatctcctttccaccaagaagcctacttaggtttaacacatgaaagcagtgtctaaaaattagatcggtcctaaattggaatgggatgtcttccttgcatgtcccataccagggaatttttttaacacacagtgtagagcctttgccagagatgttgaaagggagattaaaggcttgagggatgaatttgatcatcattcttaaagtcccttccaatcctgtgattctctgattccctgagtctcgtttattattggacatgcctagcccatcaccagtgacctgcccgcatattgctggcttcccttggataacggagagcctatcaccacatgcctttgttgtcttccatcatatcaagngagttgctttctggactttttncatctanaacctgctaaggttggttttganaaaaagatggagaantttcttttcatgagtttgtagggcaaaaaaaattctttttacctgcccgggcnggccctcnaaaaggcgaantccagccccttggcgg

SEQ ID NO: 91 - DNA, 363 bp, Homo sapiens
ctgcaagccattcgaataattcaagagagaaatggtgtattacctgactgcttaaccgatggctctgatgtggtcagtgaccttgaacacgaagagatgaaaatcctgagggaagttcttagaaaatcaaaagaggaatatgaccaggaagaagaaaggaagaggaaaaaacagttatcagaggctaaaacagaagagcccacagtgcattccagtgaagctgcaataatgaataattcccaaggggatggtgaacattttgcacacccaccctcagaagttaaaatgcattttgctaatcagtcaatagaacctttgggaagaaaagtggaaaggtctgaaacttcctccctcccacaaaaa

SEQ ID NO: 92 - DNA, 450 bp, Homo sapiens
  misc_feature (1)...(450): n = A,T,C or G
ctgctcgaacactgagcttgtgtaaaagttgaaccatgaggccacaaaagcggtcaaaggttctgggaattcgggtctggggattcacttcaatcagaacattcttctgtgtatggatataaacctgtagcaagccagctcggttcangggactatccatcagcatcagcaaactctggtgggtgatatctggccgcgcttccccagggtcccgtccattcttcaacaatatagacttgtgcttgtcacagttgagtagctcatatgtcttccctaccttgactgtctccagactggccccttccagcaccacaataagcctacggcctccgatcttgtttcctgcccctantcggggccgcttgggtggcanagcatcccaatcctgtgcctgctcccaccgcttcgttcacgaagcttgaatncataaccttcggccgcgaaccacgc

SEQ ID NO: 93 - DNA, 537 bp, Homo sapiens
  misc_feature (1)...(537): n = A,T,C or G
cctggcctcacatgacccctgctccagcaacttgaacaggacaagcagcagctacatccttaaggtcgggaaagtaagatgaggatttggatcctgcattgccctgcctcccaccctatctctccccaaattataaacagccatccttgggaagcangcagagttaagacgtctccccactgccctagtgacatacacaccaacaggagagcatgttcagatggcacagaatccagggactgcatttcatgaggagaaactggtaccaaaatatgggtggggagtcggggggtgtgagaaggcaagcgcaaagagaaccttcctccgtttctactcatcggatcctgacgctgactcctctgactggggggagtactggctagttcttcttcttcagagtactngntcctcctcctcttctttttgctcttgttctctcccnaagagctctcntcactanacacaaactctttgctcttgaagcttntcgcttactgcttgaggacnacttgnatgatgacccctaaaaggcgggga

SEQ ID NO: 94 - DNA, 404 bp, Homo sapiens
  misc_feature (1)...(404): n = A,T,C or G
gcgagaagaaaaagggccgttctgccatcaacgaagtggtaacccgagaatacaccatcaacattcacaagcgcatccatggagtgggcttcaagaagcgtgcacctcgggcactcaaagagattcggaaatttgccatgaangaggtgggaactccagatgtgcgcattgacaccaggctcaacaaagctgtctgggccaaaggaataaggaatgtgccataccgaatccgtgtgcggctgtccagaaaacgtaatgaggatgaagattcaccaaataagctatatactttggttacctatgtacctgttaccactttcaaaaatctacagacagtcaatgtggatgagaactaatcgctgatcgtcanatcaaataaagttataaaattgcaattttttttt

SEQ ID NO: 95 - DNA, 560 bp, Homo sapiens
  misc_feature (1)...(560): n = A,T,C or G
aaaggtatttgctcattggtctggcttagagacaggaagacatatgagcaataaaaaaaagattcttttgcatttaccaatttagtaaaaatttattaaaactgaataaagtgctgttcttaagtgcttgaaagacgtaaaccaaagtgcactttatctcatttatcttatggtggaaacacaggaacaaattctctaagagactgtgtttctttagttgagaagaaacttcattgagtagctgtgatatgttcgatactaaggaaaaactaaacagatcacctttgacatgcgttgtagagtgggaataagagagggctttttattttttcgttcataccactattgatgaagatgatactaaatgctaaatgaaatatatctgctccaaaaggcattnatncttnacttggagatgcancaaaaacacnaaaatggaatgaagtgatactcttcatcaaacagaagtgactgttatctcnccattnngtnaaatcctaagcagaanacataaanantcntgacnaaaaanacacttggcntattactggcttggaaag

SEQ ID NO: 96 - DNA, 618 bp, Homo sapiens
  misc_feature (1)...(618): n = A,T,C or G
ccaggctggttttgaactcctgacctcgtgatccacccgcctcagcctcccaaagtgctgggattacaggcgtgagccaccgcgcccggcaagaattcaaagttaaaacaggttaccactttcacctattaccatcaggttgcttatttttgttttatgttttttatttgtatgcatgtttactttatgtttcagtttactaccccctaaggcagcaagagagcaggaagataagcaaaatagagatgtttttgacaacttggcactgagagactatcctaagggaataatctgaaatacataaaaacattttattcacaaaattggtcatcacagcattatttacaatactgaaaatctggaaatagcctaaatttctaacaattgaaagaangttaagtaaattataagactacacaataaaatatattaccagcaatatatctttgtgaaaatctataataaccacacataatacttagtaaaaaagaacataaattacatgataaagaatatgatcagaacaatgcaaaaaattccacccccaaaaaagacaanatttatttggcatttcgtggcaaaatttcatgtatttggntgganttctaaattttccga

SEQ ID NO: 97 - DNA, 346 bp, Homo sapiens
aaaatttccttccatttcagtatatgcatactcagttcatcacatagtaatatcaataaaaaaataaacttccatttcttataagaaaaacattaacttaattcacagttagccttttcccacaacactcaatactccagtagcttctaggaagagaggtatattagtgataaaaatggaatattaaaaatccatgacttgggagtaaacggagcccttaactcctcctctccccctacctgaatcacaaaagggttttcctgaaatgagaggggatgggactggggtcagcaggattctcacctcggtctaactacaaggtacggggagaagacaggagggctgg

SEQ ID NO: 98 - DNA, 499 bp, Homo sapiens
  misc_feature (1)...(499): n = A,T,C or G
ggaaaatgcttctcagtccacagttaaagttctcatcagactactgaaggacttgaggattcgttttcctggctttgagcccctcacaccctggatccttgacctactaggccattatgctgtgatgaacaaccccaccagacagcctttggccctaaacgttgcatacaggtacagcatgctttgggtttagggttggttgtaaactattttgtgcattcctttaatacctcatacctccctgtgttctaggcgctgcttgcagattctggctgcaggactgttcctgccangttcagtgggtatcactgacccctgtgagagtggcaactttagagtacacacagtcatgaccctagaacagcaggtattgggacagatatgaactgagttgttttgccccactcttttgaatactgctgctcagcangcaaagtgggaatatggtctttacgggtcangaatttggggattctgaaagactttggtcctgagattt

SEQ ID NO: 99 - DNA, 396 bp, Homo sapiens
cctgctcgctgggcagacataccatgtggctgtggtctgctacctgaggtctcaggtcagagccacctaccatggaagtttcagtacaaagaaatctcagcccccacctccacagccagcaaggtcagcttctagttcaaccatcaatctaatggtgagcacagaaccattggctctcactgaaacagatatatgcaagttgccgaaagacgaaggaacttgcagggatttcatattaaaatggtactatgatccaaacaccaaaagctgtgcaagattctggtatggaggttgtggtggaaacgaaaacaaatttggatcacagaaagaatgtgaaaaggtttgcgctcctgtgctcgccaaacccggagtcatcagtgtgatgggaacctaagc

SEQ ID NO: 100 - DNA, 274 bp, Homo sapiens
  misc_feature (1)...(274): n = A,T,C or G
ccgccatggccgaggaaggcattgctgctggaggtgtaatggacgttaatactgctttacaagaggttctgaagactgccctcatccacgatggcctagcacgtggaattcgcgaagctgccaaagccttagacaagcgccaagcccatctttgtgtgcttgcatccaactgtgatgagcctatgtatgtcaagttggtggaggccctttgtgctgaacaccaaatcaacctaattaaggttgatgacaacaagaaactagganaatgggtagg

SEQ ID NO: 101 - DNA, 589 bp, Homo sapiens
  misc_feature (1)...(589): n = A,T,C or G
cttttagaaagccatcaagaagagacaaatcagttacttaaaaaaattgctgagaaagatgatgatctaaaacgaacagccaaaagatatgaagaaatccttgatgctcgtgaagaagaaatgactgcaaaagtaagggacctgcagactcaacttgaggagctgcagaagaaataccagcaaaagctagagcaggaggagaaccctggcaatgataatgtaacaattatggagctacagacacagctagcacagaagacgactttaatcagtgattcgaaattgaaagagcaagagttcagagaacagattcacaatttagaagaccgtttgaagaaatatgaaaagaatgtatatgcaacaactgtggggacaccttacaaaggtggcaatttgtaccatacggatgtctcactctttggagaacctccgaatttgantatttgcgaaaagngctttttgagtatatgatggggtcgngagactaagaccatggcaaaagttttaccaccgtctgaagtccctgatgatcagactnagaaaattttggaaagagaanatgctcngttgatgttcttccctccagngg

SEQ ID NO: 102 - DNA, 209 bp, Homo sapiens
  misc_feature (1)...(209): n = A,T,C or G
aaatttnggttaaaaatttaaaccggcaaacctttccaaacctttaanttaaaggaggaggcccggcaaanatttttaggnggnggccccccnctttcctttaanggcaaatnggcccaantaggccctttccngcaanggaccaggaggcctcaggccccccaaagcttaggttagcaaataggagcaatttaaattcctagnccaag

SEQ ID NO: 103 - DNA, 655 bp, Homo sapiens
  misc_feature (1)...(655): n = A,T,C or G
aaactttcaaagaatcacttttaggcttacaaaaataaatatttgtcaaaatgttcaataaatattacataaaactagcagcaaaaagtatctagaaatctgtcgtgtgcaaatagttttcttcccaactatcattcccatggtcccaaataaattttagaatctagtcccatccccttcctagacaagctgcgttcaacaatctccaagagacaaagtaagattggaagtttaaggacacgcacacaagacatatatataaaattctctgaatgtgcaataaaagaagtactttgtaaaaagttatgggcaaaatgtacaagggcctaaacctagactaattgaaatagcaccataacaaatgacctcaatactgtcaagtgcacctacttaataaaagttttagaacaaggcacaatacacttggaaaatctattgcacttttangaaaatttttgcccgtcttncttttgccactggtaaaaaagatgganccggttttggatcanccnccatttttggaacctttngggcccggnaaccnccctttaangggcgnaaattccanccccccntnggggggccggtttctttnnggggaatncccanacttcgggncccccaanctttgggnggnaaatcaatggggccatta

SEQ ID NO: 104 - DNA, 352 bp, Homo sapiens
ctgttgcttaccatgcccaaaataatcctccagttcctccaaagccacagccaaaggttcaggaaaaggcagatatccctgtaaaaagttcacctcaaactgcagtgccctataaaaaagatgttgggaaaaccctttgtcctctttgcttttcaatcctaaaaggacccatatctgatgcacttgcacatcacttacgagagaggcaccaagttattcagacggttcatccagttgagaaaaaactcacctacaaatgtatccattgccttggtgtgtataccagcaacatgaccgcctcaactatcactctgcatctagttcactgcaggggcgttggaaagacccaaaa

SEQ ID NO: 105 - DNA, 355 bp, Homo sapiens
  misc_feature (1)...(355): n = A,T,C or G
aaataatccaggcaggagaagagaggagggcacacttggaactcccctccccacaatacgtgattatttacattttagtaattggacaatcccggctcaggaggaggttgcaagaatctgcaaaagttggagggagcgccccangagaacaaacagcaagccttatttcccctagcccatcccccaaaaaaccatccatcccatcctagtgtctggtggtgtccggtggtgtccatcttccattccttcccaaattatggaagtaaggttcttctcaccagaataagagcacttgggataacagagtanggtcccctcacccaaaaaaaaaaaaaaaaaaaacnctngggggaaa

SEQ ID NO: 106 - DNA, 102 bp, Homo sapiens
  misc_feature (1)...(102): n = A,T,C or G
tngaatcactcctatagggcgaattcgagctcggtacccggggatcctctagagtcgacctgcaggcatgcaagcttgagtattctatagtgtcacctaaat

SEQ ID NO: 107 - DNA, 357 bp, Homo sapiens
ctgggaacaactttcttcaaactacctggtggtgaacttaacccaggagaagatgaagttgaaggactaaaacgcttaatgacagagatactgggtcgtcaggatggagttttgcaagactgggtcattgacgattgcattggtaactggtggagaccaaattttgaacctcctcagtatccatatattcctgcacatattacaaagcctaaggaacataagaagttgtttctggttcagcttcaagaaaaagccttgtttgcagtccctaaaaattacaagctggtagctgcaccattgtttgaattgtatgacaatgcaccaggatatggacccatcatttctagtctccctcag

SEQ ID NO: 108 - DNA, 174 bp, Homo sapiens
aaaggtgataaacacaaaacctcgtcttttgttcaactttggatccattggcaattcaatggcctcaatctccccaaactcgccaaagtactccctgatcttttcctcagtggcttcaggattcagacccccaacgaagattttcttcaccgggtccttcttcatagccatggc

SEQ ID NO: 109 - DNA, 623 bp, Homo sapiens
  misc_feature (1)...(623): n = A,T,C or G
tgcaaattaattttaagggcttacagagtcatttgaagaagtgtggtgggaaatacaatcagattttggcatttcgacctacaggatggacacactctaacaagttcactagaatagcagatgttattccccagaccaaangaaacatttcaatatatggaattccttacagtgaacacagcagctacctagaaatgaagcgctttgtccagtggctgaagccccagaaaatcatacctactgtaaatgtgggcacctggaaatctaggagcacaatggagaaatattttagagagtggaaattggaagctggatattgatgatacctccgaggattcagtagtagttaagttccttggatgtagcttgttagtagttaaatctatagaaatgtgaaatacactttgtgtggaaaaacctcatgaagattgttcaaaatactttattttctcatttatgtttgaaccaacatgttcgtggtgcttgaatgcctctcagcatcatcaangataactgaaactgggtctcctgggaccttaattcttgtcccctgccttcatgggcagttatatttgcntcaagccttaaaaaagaacaaaggcagattcnggaccnaaggatat

SEQ ID NO: 110 - DNA, 638 bp, Homo sapiens
  misc_feature (1)...(638): n = A,T,C or G
actatgtgactatcattgatgccccangacacananactttatcanaaacatgattacagggacatctcaggctgactgtgctgtcctgattgttgctgctggtgttggtgaatttgaagctggtatctccaagaatgggcagacccgagagcatgcccttctggcttacacactgggtgtgaaacaactaattgtcggtgttaacaaaatggattccactgagccaccctacagccagaagagatatgaggaaattgttaaggaagtcagcacttacattaagaaaattggctacaaccccgacacagtancatttgtgccaatttctggttggaatggtgacaacatgctggaccaagtgctaacatgccttggntcaagggatggaaagtcacccctaaagatggcaatgccagtggaaccacgctgcttgancttctggacttgcatnctaccaccaactcgtncaactgacaancccttgcgccttccttttncaggatgncctacaaaaattggtgggnttnggncttgntcctgttgggcccaatngaaactggnggttctcaaaccccgggnttgggggncnacttttgcttcntcaacntttcnaccggaanntaaaatctttccnaaa

SEQ ID NO: 111 - DNA, 492 bp, Homo sapiens
  misc_feature (1)...(492): n = A,T,C or G
aaaaaaagtacaaatctgttaaaaatttcaatcagtatacacatatatataatacaacatactagttatgttaaatgctacaaaccaatgtgaatcccatggaatggaaaaaaccacacatttaagctttaagaaccatttttttctctatatattagcattttctcaaatacatacatgggaaaaatgaggtaactgtaaaatgtgcaaggaacagggcccccaaaattacatatatttctacatatatatgtaattttatatatatataaaacctttctaacacagaacacaggcgctgggcccagccagggctgggggaaggtgcccactgtcatgcctangccanaagttggtaaataagagagtaaacaatggcaagcccccaccacaggaaatcattggtaacatggcatctatagcaaggtcggcagatcacaaacatcctaagtaattgttgtataaatcttgttttttaatgatgatcttttt

SEQ ID NO: 112 - DNA, 598 bp, Homo sapiens
  misc_feature (1)...(598): n = A,T,C or G
ctgcaggaagaggtggaggggggcctgtcattatgtttcccccccaccccccaacgaaaggaaaactaagactcccaacataaacagggccttgaggggggggattacaggcacttgggcatggagtcttcggctgcaggaagcactccgcttattcttcaggaatgggaaaggcgtgacccaacgagagcatctgtctcagagctccactcagggtcacccctctccagaggccggtatggggtggcttcagacttccactgcacgacctggagcaccaagaccacacaccacaataccaaattcacccaagaagangtttcagcattgtgtaggttggagtaaaactgcanagcagttccagggggtgtccatggaattttctgggcttcagaacagctaattgtagtgttcaagganatgatgganttgcagagagacctggtgccaaatcgaaggatacaggcagacaccaanaccaggaanacggctatacttanatggacctcgcccgcnaccaccttanggcgaattccancacacntngcggccgtactatgggnanccaantcgtcccaaccttggcgnantatggcta

SEQ ID NO: 113 - DNA, 489 bp, Homo sapiens
  misc_feature (1)...(489): n = A,T,C or G
ctgtggcctaggctacctcaagactcacctcatccttaccgcacatttaaggcgccattgcttttgggagactggaaaagggaaggtgactgaaggctgtcaggattcttcaaggagaatgaatactgggaatcaagacaagactataccttatccataggcgcangtgcacagggggaggccataaagatcaaacatgcatggatgggtcctcacgcagacacacccacagaaggacactagcctgtgcacgcgcgcgtgcacacacacacacacacacgagttcataatgtggngatggccctaagttaagcaaaatgcttctgcacacaaaactctctggtttacttcaaattaactctatttacctgcccgggccggccgntaagnggcgaattccagcacacttgncgggccgttctaacgggatccgagctnngtaccaaggtggncataatnatgggcatatctggtntctnggaancgacc

SEQ ID NO: 114 - DNA, 244 bp, Homo sapiens
  misc_feature (1)...(244): n = A,T,C or G
ctgaccggaccggtcatgcccgtccggaacgtctataagaaggagaaagctcgagtcatcactgaggaagagaagaatttcaaagccttcgctagtctccgtatggcccgtgccaacgcccggctcttcggcatacgggcaaaaagagccaaggaagccgcagaacaggatgttgaaaagaaaaaataaagccctcctggggacttggaatcaaaaaaaaaaaaaaaaaanccccccnnggggg

SEQ ID NO: 115 - DNA, 349 bp, Homo sapiens
  misc_feature (1)...(349): n = A,T,C or G
aaaggtgataaacacaaaacctcgtcttttgttcaactttggatccattggcaattcaatggcctcaatctccccaaactcgccaaagtactccctgatcttttcctcagtggcttcaggattcagacccccaacgaaagattttcttcaccgggtccttcttcatagccatggcctttttagggtcaatgacacggcatccagcctgtgctccttctggtctangaccttctccacactggctgcatctttgaacaggataaacccaaaccctcttgaccgtccagtgttgggatccatttttattgtacagtcaacgacctctccaaatttagtaaaatagtctttt

SEQ ID NO: 116 - DNA, 561 bp, Homo sapiens
  misc_feature (1)...(561): n = A,T,C or G
ccaacaaacttcaagccttgttcttccaaacactttttccagactggattcacctcaaatcggtggcggtgcctctcttccaagtagtctgcgtctccatagagtttcctcatgactgagttcttggtctggaacaaggttctcctcttgcccagcctcatggttccgcccatctgccctgggttgtgttctggcatgtctacgaccacgggatgactggtcgtagggtcaaactctgtagaattggcatcttgccatcccagcacgtttcttgagaattcaaccactgccaactgcatccctaagcacacgcccaaaaaaggctttttctgattccgagcccaggcaattgcttggatttttccttctgttcctcgaacaccaaatcctcctggaaccagcactccatgagcactacagagcttctgccaacttcgtggtagcgcacgggctcttcttgcgaggtgatgggctccaaagtcccgcanaatctattgtaccttgatttccaatttgtgggttgatngacctgcccngcngccccttaaaaggcgaattcca

SEQ ID NO: 117 - DNA, 383 bp, Homo sapiens
  misc_feature (1)...(383): n = A,T,C or G
aaactgggtgtttagaatattataatgtagcaactctggaaatatgatcctacgccctctcccgggtttgttcttgctgtttgttgcagtagttatttgtttaatgacttttctggttgtaaagtctgtattttttgtcacgtatggccgtttcttcctattcttttagcccagtggtcagtgataggacagagatttccttaaacatctggaatcaaaaaaacccataaaaccctcccagagtttgtagaagggtctgtgtgcatgtggggtcagcccttccgcggttaaacacattttcaactctgccttancttttgcttcctgtgtgtgcggagcctgaaggcggccagacntgagagcttagcttcngccctcgcagg

SEQ ID NO: 118 - DNA, 625 bp, Homo sapiens
  misc_feature (1)...(625): n = A,T,C or G
aaaaagaaggtgctcagtttatttataaaatcggtgtcgccgactgctctgtttatgctaaaattatgatcatttttctcaactttggcatttgtcagttgggaagagaagccaaggcacctttggaagcatcataaaaagtgaatcatttgacccattactaaaatgcagccgcccctgagttgcgaagtggcagtcaattagcagcgtcttagggtacatactacagcttaatttgtggaatataagatgtggatatgttgggatagactttccaggggcttcctcagagcaacattacagcacatataactaaaaattcagagacaaagaacatgcactatcctgtcctctcactccccaggtgacaggcagggggaggtccctgagatctggggatgcacttgtctccacgtgcattttacttatcactcttaacacacttgtctagttcacatgaattattttcccaacttctaatatgnctttgaagatagatttatcttggtcatattggaccttctgcttttggcttcttttgttcttgctcttggttgctcactccaacttctanaattgaatcatttcctccaaaatataaaactaggncatatctgggggngaa

SEQ ID NO: 119 - DNA, 344 bp, Homo sapiens; identical to SEQ ID NO: 9

SEQ ID NO: 120 - DNA, 559 bp, Homo sapiens
  misc_feature (1)...(559): n = A,T,C or G
aaagtaagtcgtttccttttatttgaacacctaggggccattttagagttataattagcccaatttctatatcattttgtctcagggaatagaancntnaggganggananagttgggggaatggctggttggtanagtggtcagaatacacacaacatttataaataaagttagccatctaatatggttgtgattcgtggtacctcacaatgattatgatagtaacataaaagctcactgaccacaggtcaccgtaacagatataataataatgatctttgaaatattgtgagaattaccaacatgtgacacagagacatgaagtaaacatatcctcttggaaaaatggcaccaatagacttgttcaatgtnngattgctncanacgngcnatttgtaaaancacaatatctatgaacctcagtaaanngaagtgcagtaaaacgagatcncctgtcttgatcctaacttactgattatcctctgctggcacatttccaattgatttntccaacgtctcaagggtcaaancatgattcanacaanatttngtcaatga

SEQ ID NO: 121 - DNA, 576 bp, Homo sapiens
  misc_feature (1)...(576): n = A,T,C or G
ccagtccaagctggaggaggccacaatgattcattagagctttgaggttgttcttgaagagctgaatataggacatgagctgtcccggtgtgactctccccatactcatcttgattggcaggttttctctgcttgccgcttccactagatgtctccgaacttccatcactgcctctttgtgcttagtgttcagtaaagcttcccatagggctttggctgtggtgtcactggattgtgaaagacagcctggtgcaaccacattataattttcctcctcagtatggagtgcagtgagcgctatcatgttaaccatcacatcatttgtgtggcctgggagctggggaagtgctgaaatgatcttctctactaagttgtctccatgatgtccaactgctcctgtgagatccanggttctgtccacaaaaaccactgatgccctgcctgcacagtcttcttcctgttctttgcaggggcataattggacctcggccgcgancacnctnagggcgaattcancacacttggcgnccgntctaatggatccnaactcggtccaagcttggcgtaatcatgggc

SEQ ID NO: 122 - DNA, 624 bp, Homo sapiens
  misc_feature (1)...(624): n = A,T,C or G
gagagcgagctgagtggttgtgtggtcgcgtctcggaaaccggtagcgcttgcagcatggctgaccaactgactgaagagcagattgcagaattcaaagaagctttttcactatttgacaaagatggtgatggaactataacaacaaaggaattgggaactgtaatgagatctcttgggcagaatcccacagaagcagagttacaggacatgattaatgaagtagatgctgatggtaatggcacaattgacttccctgaatttctgacaatgatggcaagaaaaatgaaagacacagacagtgaagaagaaattagagaagcattccgtgtgtttgataaggatggcaatggctatattagtgctgcagaacttcgccatgtgatgacaaaccttggagagaagttaacagatgaagaagttgatgaaatgatcagggaagcagatattgatggtgatgggtcaagtaaactatgaagagtttgtncaaatgatgacagcaaagtgaagaccttgtccagaatgtgttaaatttcttgtacaaaatggttatttgccttttctttgtttgnacttatctgtaaaaggttcttcctctgcaaaaaatngcatgtntagtaattag

SEQ ID NO: 123 - DNA, 366 bp, Homo sapiens
  misc_feature (1)...(366): n = A,T,C or G
aaatagagttaatttgaagtaaaccagagagttttgtgtgcagaagcattttgcttaacttagggccatcaccacattatgaactcgtgtgtgtgtgtgtgtgtgcacgcgcgcgtgcacaggctagtgtccttctgtgggtgtgtctgcgtgaggacccatccatgcatgtttgatctttatggcctccccctgtgcacctgcgcctatggataaggtatagtcttgtcttgattcccagtattcattctccttgaagaatcctgacagccttcagtcaccttcccttttccagtctcccaaaagcaatggcgccttaaatgtgcggtaaggatgaggtgagtcttgaggtagcctangccacag

SEQ ID NO: 124 - DNA, 280 bp, Homo sapiens
  misc_feature (1)...(280): n = A,T,C or G
ctgaagcagcagaggtgattctgcgtgtggacaacatcatcaaagcggcacccaggaaacgtgtccctgatcaccacccctgttaagcattcccacgtgctgtcgatctttggaccagtttctancaaagttgngtttgaaagatactctattaaagaagactgtggaatctgtttatcggtgcccattatatccttaagtttggatatttagctgaccttcgctttaacatangtctaatttatttgccgtgtcattttccatacaaatcagttgattt

SEQ ID NO: 125 - DNA, 532 bp, Homo sapiens
  misc_feature (1)...(532): n = A,T,C or G
gttgggggccgtcccgctcctaaggcaggaagatggtggccgcaaagaagacgaaaaagtcgctggagtcgatcaactctaggctccaactcgttatgaaaagtgggaagtacgtcctggggtacaagcagactctgaagatgatcagacaaggcaaagcgaaattggtcattctcgctaacaactgcccagctttgaggaaatctgaaatagagtactatgctatgttggctaaaactggtgtccatcactacagtggcaataatattgaactgggcacagcatgcggaaaatactacagagtgtgcacactggctatcattgatccaggtgactctgacatcattagaagcatgccagaacagactggtgaaaagtaaaccttttcacctacaaaatttcacctgcaaaccttaaacctgcaaaattttcctttaataaaatttgcttgttttacctcggccgcgaccacgctaagggcgaattccagcacacttgnggncgttctagtggatccganctcgtaccaagc

SEQ ID NO: 126 - DNA, 534 bp, Homo sapiens
  misc_feature (1)...(534): n = A,T,C or G
ctgcaattacatcattttttatctatcttctgcttttactttgtgtagggtagggatggggacttacaaatgggccaaagacacttcaacctcaaaaccaaagagaaatctctgcttgcagagatacaaagaaagtaactctccctcttatgaaaagtaaccaggaactctactccagttatgagggccactgatggtgtgggagagctatcaagaagattcttcctagacgtggtgcaaagacagtgagaacccaggaaatcacattcatgggacacttgctcttaccgtcatcaccctctattctatctcaactttggccccatcaaatctaatgataaacaaaagaaggtaattacatgtagaaaatcaaagngaatgggaatgtggtggngtgaacataaaagaagaaattgaaaacaatcaaaagtttctcagtgctgctttcccncactgtcatagaaatctctgatccaattcttcatatgnctaacttccaaggacggctaacagcacagacatangaatccaacg

SEQ ID NO: 127 - DNA, 529 bp, Homo sapiens
  misc_feature (1)...(529): n = A,T,C or G
cctagcagggaagcagcatgcaggcttcacagcttaatgccaaggacagcgagtgaggctgggagcttctcttgggcctgctgggtctgtcagctctcggaatagggacagtccttactggtgccccaaggtgggacttggagaatattttgcttggcatatgtttggtctgaatggtgtagttgctggttccctagagaggaaaaggtggcaggcccagctttgctgggaaatggctcttaatttccagttgaaaccctagtagaattgtgaatgaaaacctcaaggttgagcccctctgccaagcagcagagctagtagaaggggatgcaggggcaaagcactcagttgccaagcaaggaggagagatgtacgtgggctgtgtggcagtccccacaccctgccctggcttcttcaggttatcgcaccactatggaatcctttgcagaatggtactcatataatgggtttacctcggccgcgaccacnctaagggcgaattcancacacttgcggccgttctantgga

SEQ ID NO: 128 - DNA, 531 bp, Homo sapiens
  misc_feature (1)...(531): n = A,T,C or G
aaatttctccctttgtgtgagtatgactatagttctggcctggtgttttctatttatttagttttagatgtcagcattttactatacttggtcctctcacttcagaataacagggctatttattgatacaaaggagaggtgttcagatcatcttgttaagatgcagagctcaaaataaacactaaatctttatttggagatccacatccttcctcaaaggaaggctcatgagtaaatttgtatgcagtataaagcccaagtagagggtgtatttttaatgactactttgcttacattttagattgtgcaaatgtctcaatcaatgcttgcangaatgtggaccttcctcagttttaagcagaagaccctgagcaataaatactgttgcatgcttccaataaccgtgaggggatgggatagaaatgctatctacccgacttctgaggagaaaacaaagcaggggcatgaaaaatatacaacagagatcagtaaatgggttcaaatgaaccagtaaaccatttttgccttacg

SEQ ID NO: 129 - DNA, 534 bp, Homo sapiens
  misc_feature (1)...(534): n = A,T,C or G
aaaaaacacatttatcagaatacttcaggaaaccatactatgtgtaatccaggaaatacactatttgcagaataggaaaatcatcactggcaacaaaagattaaaacaaaaataaagcaccaggattctgagcagttctaaggtgagtatatcagcagaaatagtgtaaatgctcttgactggttgctatgcaaacatgctaatgaggactagtccatgtcttataattttttttttaacatgtttctttggaaaaatggcaatattgagtggaagagaagctgtccttttagacacccagcttattggcctgggtgagaacaactttgagaactggcatgaaagcagaggtctcactgaagttgctggtgctaactatgtgggtatgcatggtcaatccttctgagtagtttcgagtttcaatgctccttgcaatgttggggtaaaccactggtgattgttggngaaagtgtctgttccctaagtttatcatacagaaactccaacgtttgctggcattcatctancttcctn

SEQ ID NO: 130 - DNA, 410 bp, Homo sapiens
ctgtctgaccatggggaccttctgtctgaagaggagctggatgaatgagactctgggaatcatctacacaggaccaaacccaacaggcgccctggcaccggggagggggtagttgtactctgcttgtacagtccttgagcccagtttacagatctggagagcaggaggccaggacaaggacaaaggctggaggatggagtaggacccaggggctctgccatcctaggcatcattcaaggtcttttatgaagactttacagatgtcctctgtaaatagcatcgagagtggagttcagctcctttctctacttttttttggtctgatggcacatatttattgttctgtggtctaatcacagtgtttctaaatgtaaaaagtgcatatgttggtgtagctagtcccgggcggc

SEQ ID NO: 131 - DNA, 529 bp, Homo sapiens
  misc_feature (1)...(529): n = A,T,C or G
cctggtggcgggcgcctgtagttccagcttctgggaaggctgaggcaggagaatcgcttgaaccctcctggggttgagagattgcagtgagccgagatcgtgccactgcactccagcctttacagtaaggaaaacagaagcccagagagatctgatctggttcccatgtggggtccgaagccactctgcggccattgcctttgtcatcctgcagggtggagacagctttgcctcccttttgcgtttgggatttttcagaataactgtagccagtgcttcctgtttatgagtactgttcatccaaataatccttcgggggtccttctggggggtgtgtgggaggagcaacacaaacacccagcaattggagaaaacagaagaaaagcgataatgtggtctggagactagaggatagctctgcggtcagccctgccctcgggaactgctggggaggtgggatggggtcagggagtggacctcggncgnnacccccttaagggcgaattccagcacactggnggccgntntn

SEQ ID NO: 132 - DNA, 341 bp, Homo sapiens
gcgagggtgagggccccctgctgcgctggctcaaggtgaacttcagtgaagccttcattgcctggatccacatcaaggccctgagagtgtttgtggagtccgtgctcaggtatggactaccagtgaacttccaggcagtgctcctgcagccgcataagaagtcatccaccaagcgtttaagagaggttctaaactctgtcttccgacatctggatgaagtagccgctacaagtatactggatgcatctgtggagatcccgggactgcaactcaataaccaagactattttccttatgtctacttccatattgaccttagtcttcttgactagaaaggccag

SEQ ID NO: 133 - DNA, 536 bp, Homo sapiens
  misc_feature (1)...(536): n = A,T,C or G
ccagagtggtagaagagatacggagtaggaattaaaccacacaatgttatttagggactaagccatgcccctaacaagaaaacaagccaaaaggaaagtattaggcattctctgggaaggcatgcatttttttcccatgtctctggggccaaaaaccttataccaagtacctattggcacccgaatatatttgtagaatgaatgaatacatgaaaaaaaataaacagtaacctttctcctatattctactttccaagccaattaataagcaagtgtcttttcgtcatgattttttttgttttctgtttaggatttaacaaaatggttgagataacagtcacttctgtttgatgaagagtatcacttcattccatttttgtgtttttgttggcatctccaantcagaataaatgccttttggagcagatatatttcatttagcatttagtatcatcttcatcaatactcgtatgaacgaaaaaataaaaagccctcttttattccactctacaaccgcatgtcaaangnngatctgg

SEQ ID NO: 134 - DNA, 537 bp, Homo sapiens
  misc_feature (1)...(537): n = A,T,C or G
aaaggctatatttttcagcatgtaggtagctacactgtaatcctgttgaagaaactttcctatttaagcttataggatgaaaatatataattaaagtcttctgatcatagcttgagaccatcaagggaatgtttagtttcctccacaaagagccaccangattttctcataatctcctttggtttcatccaggatggcttggcaaagggagataccatacatcttctgatagaatgctttgatatcattcatgtcaatttcagaacgggaaaccataatcctgatcaatgccttatggcgagttccaacacctttcatggcttgatgaagcttctctgcaaagaaagctggtttgcttgtggcgcacttcacgatagctgtgaggcatttctcaatgtcacctttcaactccaggtccagaactttgttcatgtcatgcttactgtacttgggngtatttctgaaacactctgcgaagttgnggatagcttctggtggtaaggatggtattgaacacgtttacntctgtcccctttc

SEQ ID NO: 135 - DNA, 532 bp, Homo sapiens
  misc_feature (1)...(532): n = A,T,C or G
ctgcaggaagaggtggaggggggcctgtcattatgtttcccccccaccccccaacnaaaggaaaactaagactcccaacataaacagggccttgagggggggggattacaggcacttgggcatggagtcttcggctgcaggaagcactccgcttattcttcaggaatgggaaaggcgtgacccaacgagagcatctgtctcagagctccactcagggtcacccctctccagaggccggtatggggtggcttcagacttccactgcacgacctggagcaccaagaccacacaccacaataccaaattcacccaagaagaggtttcancattgtgtaggttggagtaaaactgcanagcagttccagggggtgtccatggaattttctgggcttcagagcanctaattgtantgttcaangagatgatggagttgcagagagacctggtgccaaatcgaaggatacaggcngacaccaagaaccaggaagacggntatagctgaaatggactccggcccnaacaccctaagggg

SEQ ID NO: 136 - DNA, 535 bp, Homo sapiens
  misc_feature (1)...(535): n = A,T,C or G
aaaacaggcccagtcaatgccatttattatacatgtcaaacagcttctaagaccgaagggctcccataataaggttttggggattttttgttttgtttttcattttcttttttgcatcaaacaggttcttccaaaagcctgctcacaaggtagacaaaaacataaatcttcaggaaaatgaaacaagagaagctgaaacaatctacacctgaatgttaaaaaactcatcagacacaaaccacaccaaacactcatcccatttaatttcctgttacatgctctgaggaagccaagaacatcaggccccagggcagcaatgctctaggattccagctcggaccccctctatatgacagattcatgcacacacatccacacaccatataaccaggcagaaatacacatgcatgcacaggtggctagagaaccatagggcaggatgggaaaaagggctgatcaaggatatgcaatcaactggaaactgggacctanagaatgcttctgtgcaggatgaacatgagttaaaattaaaann

SEQ ID NO: 137 - DNA, 536 bp, Homo sapiens
ccaggctggtctcgaactcctggtctcaagtgatccgcccgcctcggcctcccaaagtgctgggattacaggcttgagccaccatgcccggccagacttacttttttgttaacggtctttgaaccttttcacggcacacatgtaaggccgcctgtgacatgtggtaccctggcctccaactggacacaactgcatttatagtttagcgaaaatacaaagttctgaaagtagccttaaaagaagtgccctttgctttgacatagcaatatcaaaagcaagtgggactgtgcaatcagagccatgagttttatgaaaactactttcctttcacatcatttgttagagaatgccacacccatgatcatgtaacattattacaatcatgaaatattactacattcgtgattaacattacccaaaaggcacatcttcaaatgttgaattaagaaaatccaaaaatcaaaacagtagagaatacattaaaaatcaagcatttaatttgtaaaccttaatgaaataacagcctactccagttt

SEQ ID NO: 138 - DNA, 533 bp, Homo sapiens
ccagacaatgaatgagaagcaactcttccatgggacagatgccggctccgtgccacacgtcaatcgaaatggctttaaccgcagctatgccggaaagaatgctgtggcatatggaaagggaacctattttgctgtcaatgccaattattctgccaatgatacgtactccagaccagatgcaaatgggagaaagcatgtgtattatgtgcgagtacttactggaatctatacacatggaaatcattcattaattgtgcctccttcaaagaaccctcaaaatcctactgacctgtatgacactgtcacagataatgtgcaccatccaagtttatttgtggcattttatgactaccaagcatacccagagtaccttattacgtttagaaaataacactttggtatccttcccacaaaattattctccatttgtacatatctagttgtaaaacaagttttagctttttttttaattcctcttaacagatttttctaatatccaaggatcattctttgtcgctgcagtcagtctttct

SEQ ID NO: 139 - DNA, 447 bp, Homo sapiens
  misc_feature (1)...(447): n = A,T,C or G
aaggtgctccttgccgccgccctcatcgcggggtccgtcttcttcctgctgctgccgggaccttctgcggccgatgagaagaagaaggggcccaaagtcaccgtcaaggtgtattttgacctacgaattggagatgaagatgtaggccgggtgatctttggtctcttcggatagactgttccaaaaacagtggataattttgtggccttagctacaggagagaaaggatttggctacaaaaacagcaaattccatcgtgtaatcaaggacttcatgatccagggcggagacttcaccaggggagatggcacangaggaaagagcatctacggtgagcgcttccccgatgagaactttgccaaacaccacatgcttgccatctagccaggctgtcttgactgtcgtgatgaanaactgggagcccgttggtgtctttgcctgcgttgg

SEQ ID NO: 140 - DNA, 397 bp, Homo sapiens
aaatgcattttatttttagacaacctacatgacatgtttttcttaaaaacaatgcctccactccaaataaatcacagtcaaaataaatgaagagctcaagatgacatcagtcccatttgtcttaagtcctggtgttgtgtggatgacaagcagaagccagttatgatgacaggtgatagatccaaaataattgccacatttgttaacatttttccatttctaaaccatccttaaagaaaatcatatatggggtcacaccatcctcacggtagtccaatagagcaaccatgccatctggattcatgttttcaccaataaagaactggtagtttttgaaattagcaaggatgtgcttgatttgttctgcagcccctgtcataaaaggttttactctttc

SEQ ID NO: 141 - DNA, 358 bp, Homo sapiens
atcaagcacatccttgctaatttcaaaaactaccagttctttattggtgaaaacatgaatccagatggcatggttgctctattggactaccgtgaggatggtgtgaccccatatatgattttctttaaggatggtttagaaatggaaaaatgttaacaaatgtggcaattattttggatctatcacctgtcatcataactggcttctgcttgtcatccacacaacaccaggacttaagacaaatgggactgatgtcatcttgagctcttcatttattttgactgtgatttatttggagtggaggcattgtttttaagaaaaacatgtcatgtaggttgtctaaaaataaaatgcattt

SEQ ID NO: 142 - DNA, 536 bp, Homo sapiens
  misc_feature (1)...(536): n = A,T,C or G
ctgcttccattggtgggtcatttttgctgtcaccagcaacgttgccacgacgaacatccttgacagacacattcttgacattgaagcccacattgtccccaggaagagcttcactcaaagcttcatggtgcatttcgacagattttacttccgttgtaacgttgactggagcaaaggtgaccaccataccgggtttgagaacaccagtctccactcggccaacaggaacagtaccaataccaccaattttgtagacatcctggagaggcaggcgcaagggcttgtcagttggacgagttggtggtaggatgcagtccagagcctcaagcagcgtggttccactggcattgccatccttacgggtgactttccatcccttgaaccaaggcatgttagcacttggctccagcatgttgtcaccattccaaccagaaattggcacaaatgctactgtgtcggggttgtagccaattttcttaatgtaaagtgctgacttccttaacaatttcctcatatctcttctggntgnagggggg

SEQ ID NO: 143 - DNA, 375 bp, Homo sapiens
aaataaaatatgcttattaaacactcctgcaaagatggttttattagtaccctggtcattttgttcaaggaagggttatattgcattctcacgtgaaatataaaaagcaagtcttgcccaataaaaacgctacattgtgtgtattttttgttcagctaagaattggaaaagtatttgcttgccttttaagttactgacatcagcttccaccagtgtaaaaattgagtaaaacctgaagttttgcataaaatgcaaatcggtgcctgtgcttgaaggttgctgtagagcatctgaccccttattaccaccttaagcaatgtatatgccatgcattaccatgcactaattcaatcacaggtgtttctatctagattt

SEQ ID NO: 144 - DNA, 421 bp, Homo sapiens
aaagatcaacttttattgtaacaaatataaagtcatcaatgttttacaaattgtcaaaaatgctttaagtacaaaaaaatacattagtaaaatgaaagttatgttgtattatttggtatacacttaatactgccaacatgcataacacatgccagaaaagctcatgcattattggaagagaaaagaaatgtgatgtaactgctatattgtctgattataaattcattgcttcagtcagttttctttcttcagggataccatttacctgcaatgtgtaagaatgaatatgggcaggagttagtcagggcatggatacttttagattttgagcaaagcaaattatggcaaggagaaagtttccatcttcttaatacaatgtaaaataattacattgcattatttctctgtatttggttttttt

SEQ ID NO: 145 - DNA, 342 bp, Homo sapiens
aaaacatccaaagcccagttaaatttggtgccagaaactgaggcaatggaaaaagctgttgatagcctcacgaatcttaaccctgtcacttgggttaaaaccattggaaattccactattgcaaattttgtattaatccttgtatgtctgtcctctctattgttagtctacaggtgtatccagcagctccggagagacagcggctagcgagaacggaccatgatgatgatggcggttttgtcaaaaagaaaagggggatatgtagggaaaagagagagagatcagactgttactgtgtctatgtagaaagggaagacataagagactccattttgaaaaagg

SEQ ID NO: 146 - DNA, 127 bp, Homo sapiens
  misc_feature (1)...(127): n = A,T,C or G
tgtaaatacggaacntcacctaataagggggnccggaaatttgggggncnccctnctttagnaatggnccaatngncctnccgnagaccgggnctccgncnccagnttgntggnaatggngnaatta

SEQ ID NO: 147 - DNA, 278 bp, Homo sapiens
  misc_feature (1)...(278): n = A,T,C or G
cgaagacctttgctctgctgctgctgtccctgttcctggcagtgggactaggagagaagaaagagggtcacttcagcactntcccctncctgcctgntggatctcatgctaaggtgagcagccctcaacctcnaggccccaggtacgcggaagggactntcatcagtgactacagtattgccatggacaagattcaccaacaagactttgtgaactggctgctggcccaaaaggggaagaagaatgactggaaacacaacatcacccagagggaggct

SEQ ID NO: 148 - DNA, 538 bp, Homo sapiens
  misc_feature (1)...(538): n = A,T,C or G
ccaatactcccatttggttttactggcggcatttgattgtattgatgatactaagcttgtgaagcagataatcatatcagaaattatcagttcattgcctagcatagtaaatgacaaatatggaaggaaggncctattgtacttactaagccccagagatcctgcacatacagtacgagaaatcattgaagttctgcaaaaaggagatggaaatgcacacagtaagaaagatacagaggtccgcagacgggagctcctagaatccatttctccagctttgttaagctacctgcaagaacacgcccaagaagtggtgctagataagtctgcgtgtgtgttggtgtctgacattctgggatctgccactggagacgttcagcctaccatgaatgccatcgccagcttggcagcaacaggactgcatcctggtggcaaggacggagagcttcacattgcagaacatcctgcaggacatctagttctgaagtggttaatagagtagataaaaagatgaaagaaaatggggagagaaggttgg

SEQ ID NO: 149 - DNA, 121 bp, Homo sapiens
  misc_feature (1)...(121): n = A,T,C or G
tccaantctcgggncgggggccctcaaantatccntatggancaaggtgntgtannatctaccctatctntcaggataacgatcaacntttananctcatctactnntttcctacantatc

SEQ ID NO: 150 - DNA, 537 bp, Homo sapiens
ctggccaacggggccctcaaagtctccgtctggagtaaggtgctgcggagcgacgcggcctgggaggataaggatgaatttttagatgtgatctactggttccgacagatcattgctgtggtcctgggtgtcatttggggagttttgccattacgagggttcttgggaatagcaggattctgcctgatcaatgcaggagtcctgtacctctacttcagcaattacctacagattgatgaggaagaatatggtggcacgtgggagctcacgaaggaagggtttatgacctcttttgccttgttcatggtcatttggatcatcttttacactgccatccattatgactgatggtgtacagctcccaagtgctccctatccagtccaaaggaccctcttgattacagcacaaggaacttgatcgttggggaaccccaccccttggaacttggaagaccctgtttcctggaccgcgaatcagtgtggttgggcatcaagtgttttcttgcaagggttgtgacctgaaacttttacctgccg

SEQ ID NO: 151 - DNA, 384 bp, Homo sapiens
aaaagaaatcatggtacttcttagagcaatttgcaaaaggggaaaaaagtcttaggctcactccttggaaataaatatcaagtaaccataaaaatattcagccatttttcagttattcggggagttcaggcatggtcccacgcagagcatcagagttcctctttgaaataacccagctttgccaatgacatctcttttctcaactgcataacctcccaaaacatctgatcaacatcctgctgtttcacgagtccctgctgaatgtatcgaatgtatgtaaaaaagttacatacagaagtgatcctgtatctgcaaaaaggagaaatataataatagttgcttgagtcccctaatttaattctgtgtttacaggacttactctgg

SEQ ID NO: 152 - DNA, 375 bp, Homo sapiens
  misc_feature (1)...(375): n = A,T,C or G
ccaactcagcttttgtggagcgagtgcggaaacggggcttcgaggtggtatatatgaccgagcccattgacgagtactgtgtgcagcagctcaaggaatttgatgggaagagcctggtctcagttaccaaggagggtctggagctgcctgaggatgaggaggagaagaagaagatggaagagagcaaggcaaagtttgagaacctctgcaagctcatgaaagaaatcttagataagaaggttgagaaggtgacaatctccaatagacttgtgtcttcaccttgctgcattgtgaccagcacctacggctggacagccaatatggagcggatcatgaaagcccaggcacttngggacaactccaccatgggctata

SEQ ID NO: 153 - DNA, 289 bp, Homo sapiens
ccagagcatctcgtgtggaccatctaggctccttgggcttcaagcaggacctgagccacatgctccctgtacgagctgtgctatacctgtcccacatgagcacggagagcctcatgttggtgggtttccagagtgatgtgaaagcctctcaccccaatcctcggagactgagttccacaacttttttagtagctcatagtgttatttttctactctcttcatgaaactaactttattttataataaatatatattttctgtcaaaaaaaaaaaaaaaaaaaaaaaaaaa

SEQ ID NO: 154 - DNA, 73 bp, Homo sapiens
  misc_feature (1)...(73): n = A,T,C or G
tcctngagtcatanctgtttcctgtgggncatatatntgcatcngtggagcggnccgccattgcgatggatat

SEQ ID NO: 155 - DNA, 421 bp, Homo sapiens
  misc_feature (1)...(421): n = A,T,C or G
cttnagacaaangactnaaaacactcttttaatgcaagcctgaatnttcaagcacataaaatctttctttnttaancttaatttcaacatcactggaataaatncctatcgttaanccctgatatncantcttaaccacttgcagccantgttcatgaggcaaaacgtgacccaccagactttgttcaagttctcctcctagggcgtctacattcacggcggtcactccgtttctgtctccttttgtttggcacctgtcagtggatggaagatgaaagtttcaaagctcatggtaacagcagggttctctaccccaggggtttctacctgtgtctggcagtgccttaggaggatgatccagaggcttcggaggagggcgacgtgggaaggagcaggtagcccaagctcccatctcccaccc

SEQ ID NO: 156 - DNA, 339 bp, Homo sapiens
ctgagcaaaggacagtcttacagcgtcaatgtcaccttcaccagcaatattcagtctaaaagcagcaaggccgtggtgcatggcatcctgatgggcgtcccagttccctttcccattcctgagcctgatggttgtaagagtggaattaactgccctatccaaaaagacaagacctatagctacctgaataaactaccagtgaaaagcgaatatccctctataaaactggtggtggagtggcaacttcaggatgacaaaaaccaaagtctcttctgctgggaaatcccagtacagatcgtttctcatctctaagtgcctcattgagttcggtgcatctgg

SEQ ID NO: 157 - DNA, 346 bp, Homo sapiens
ccagccctcctgtcttctccccgtaccttgtagttagaccgaggtgagaatcctgctgaccccagtcccatcccctctcatttcaggaaaacccttttgtgattcaggtagggggagaggaggagttaagggctccgtttactcccaagtcatggatttttaatattccatttttatcactaatatacctctcttcctagaagctactggagtattgagtgttgtgggaaaaggctaactgtgaattaagttaatgtttttcttataagaaatggaagtttatttttttattgatattactatgtgatgaactgagtatgcatatactgaaatggaaggaaatttt

SEQ ID NO: 158 - DNA, 534 bp, Homo sapiens
  misc_feature (1)...(534): n = A,T,C or G
aaacaaggtttccccatgaagcagggtgtcttgacccatggccgtgtccgcctgctactgagtaaggggcattcctgttacagaccaaggagaactggagaaagaaagagaaaatcagttcgtggttgcattgtggatgcaaatctgagcgttctcaacttggttattgtaaaaaaaggagagaaggatattcctggactgactgatactacagtgcctcgccgcctgggccccaaaagagctagcagaatccgcaaacttttcaatctctctaaagaagatgatgtccgccagtatgttgtaagaaagcccttaaataaagaaggtaagaaacctaggaccaaagcacccaagattcagcgtcttgttactccacgtgtcctgcagcacaaacggcggcgtattgctctgaagaagcagcgtaccaagaaaaataaagaagaggctgcagaatatgctaaacttttggacctcgggcgcgaccacgctaagggcgaattncagcacacttggggggcgttctagtgggatccc

SEQ ID NO: 159 - DNA, 419 bp, Homo sapiens
gcgagcgtctgggcgggtggtaggaacaatggcgctgtcttaagtggcacagtggagcagctctgaagatgcaaagatacacgaaaaaacttccagaacatctgggagaatatttaatggaaaatcgcttggttaaaacctgacacttttaacagtgaacagcgttctgagtgtggacgagtagccagtgaagataatgaatgtcgaatgtgactgactagcagcttcattttgaatgagggtcgctgtctgcccattgatagaggccagattgtcttggaagttccaaagttgcaacgatttctggctagtgccacgaggtttacttgactgttgtgtgaaaagctgataagaaaaccatccagaaaaaagctcttcgttttacaaacatgaaaataaaacatgtaattttggattac

SEQ ID NO: 160 - DNA, 541 bp, Homo sapiens
gggatcgcaaggctgaggatgccaggagggactatgaaaaagccatgaaagaatatgaggggggccgaggcgagtcttctaagagggacaagtcaaagaagaagaagaaagtaaaggtaaagatggaaaagaaatccacgccctctaggggctcatcatccaagtcgtcctcaaggcagctaagcgagagcttcaagagcaaagagtttgtgtctagtgatgagagctcttcgggagagaacaagagcaaaaagaagaggaggaggagcgaggactctgaagaagaagaactagccagtactccccccagctcagaggactcagcgtcaggatccgatgagtagaaacggaggaaggttctctttgcgcttgccttctcacaccccccgactccccacccatattttggtaccagtttctcctcatgaaatgcagtccctggattctgtgccatctgaacatgctctcctgttggtgtgtatgtcactagggcagtggggagacgtcttaactctgctgcttcccaaggatggctgtttat

SEQ ID NO: 161 - DNA, 293 bp, Homo sapiens
ccaccgacagacctgggctcaaattggacctgctgcttttgactgtgagaccttccataagctccttttgctccaagcctcagttttctcctctgtgaaacagagaaaatcgttcctatcagagttcttatgaggatgaaatgggattttggatgtaaaatgcttccatccagtacctgctaaacaaaatgcttactaatggccgggcgcggtggctcacgcctgtaatcccagcactttgggaggctgaggcgggcggatcgcttgaggtcaggagttcgagaccagcctgg

SEQ ID NO: 162 - DNA, 536 bp, Homo sapiens
  misc_feature (1)...(536): n = A,T,C or G
aaaactgcaagcaccatgcggttcatacaatcttgttattactgttaatttatcaactaatacaaactcaaaaatgcatccggccagcagcgccagcaatttcaaatgggaacttaaaaatacacttttattttggtatttttgtcagtgcaacttaaatccttttactgacctgcagaaaaaaaaagtaataataaagaaaaacacccatatcttccctataactactatacaactgaagaattgaaggggggggacaccaccaagaactcttcctactatctcaaaagcagggaaagaaacgcaatgcattggtctaaagaacgcacttgaaagttgcaaaattacttgccaatgtttgggtttctggtacattctgagcatagcagttggttcagtgcagtgtctgcttaccagtgcactgccagggtcagggatggctaagcctctcaccctangagcgctgtggctcctacaattagcgcaggcccagagggttcagaagggacctcagggtgattctggttncataaaaa

SEQ ID NO: 163 - DNA, 533 bp, Homo sapiens
gagcccacaggggaagagcagcggaaggggcctttcggaacgatttggaatgaaaggaagtggaagaaacgcggaaccatggccgctgtggttgctgtttgcggtggtctagggaggaagaagttgacacacttggtaacggctgctgtcagccttacacatcccgggactcacacggtgctttggagaagaggttgttcacaacaggtatccagcaatgaggacctgcccatttcaatggaaaatccttataaagaacctcttaagaaatgtatcttgtgtggaaagcatgtagattataagaatgtacagcttttgtcccagtttgtttctccatttactggatgcatttatggaaggcacattacaggtctttgtgggaagaaacagaaagaaatcacaaaagcaattaagagagctcaaataatggggtttatgccagttacatacaaggatcctgcatatctcaaggaccctaaagtttgtaacatcagatatcgggaataaattctatcacgttccctaataaactt

SEQ ID NO: 164 - DNA, 331 bp, Homo sapiens
ccagaccattggctaggacctggctgtattttccatcctttacatccttctgtctgttcaagaaccagtctgggatcttgtactggcgtggattctgcataatggtgatcacacgttccacctcatcctcagtgagttctcccgccctcttggtgaggtcaatgtctgctttcctcaacaccacatgagcatatcttcggcccacacccttaatggcagtgatggcaaaggctattttccgccgcccatcgatgttggtgttgagtactcgcaaaatatgctggaacttttcagggatcactagagacatggctgcagcacaagcggcggc

SEQ ID NO: 165 - DNA, 200 bp, Homo sapiens
ccacctggaaccaccctgtcctgtctgtttacatttcactatcaggttttctctgggcattacgatttgttcccctacaacagtgacctgtgcattctgctgtggcctgctgtgtctgcaggtggctctcagcgaggtacggggagggcgtcaccctgcagaacggcagagtgacgcgtcctctcgctgctgagcaccag

SEQ ID NO: 166 - DNA, 533 bp, Homo sapiens
  misc_feature (1)...(533): n = A,T,C or G
ctggtggttaacaagtggatcgtcatgttcagtagtttatacattatgtgagaagtaacgttctgattctttttcttacacagaattggcagagggggtcgatttgggaggaaaggtgtggctataaactttgttactgaagaagacaagaggattcttcgtgacattgagactttctacaatactacagtggaggagatgcccatgaatgtggctgaccttatttaattcctgggatgagagttttggatgcagtgctcgctgttgctgaataggcgatcacaacgtgcattgtgcttctttctttgggaatatttgaatcttgtctcaatgctcataacggatcagaaatacagattttgatagcaaagcgacgttagtcgtgagctcttgtgaggaaagtcattggctttatcctctttanagttagactgttggggtgggtataaaagatngggtttgtaaaactttctttcttanaaatttatttcctanntctgtacanntggttgnttagatgtcnctatcatntc

SEQ ID NO: 167 - DNA, 636 bp, Homo sapiens
  misc_feature (1)...(636): n = A,T,C or G
ccttccagcaccgttctgtgtcctggtcgcagttcaacaaggagatcctgctgggccgtggcttcaccttttggcagtggtttgatggtgtcctggacctcaccaaacgctgtctccggagctactggtctgaccggctgatcattggcttcatcagcaaacagtaccgttactagccttcttctcaatgagcccgacggaacctttctcctccgcttcagcgactcagagattgggggcatcaccattgcccatgtcatccggggccaggatggctctccacagatagagaacatccagccattctctgccaaagacctgtccattcgctcactgggggaccgaatccgggatcttgctcagctcaaaaatctctatccccaagaagcccaaggatgaggctttccggagccactacaagcctgaacaagatgggtaaggatggcaggggttatgtccagctaccatcaagangaccgtgggaaagggaccaacccactttctaccccnaacttcagangcctaccatgggggccttcttattacctttggaaaggcccctganttcctccatgancattccagnttggcccanaaattggnnccccanggggaccccaccncanttttnctcct

SEQ ID NO: 168 - DNA, 93 bp, Homo sapiens
  misc_feature (1)...(93): n = A,T,C or G
ccttccagcaccgttctgtgtcctggtcgcagttcaacaaggagatcctgttgggccgntttttcacctttttncntctttttantgcgcttt

SEQ ID NO: 169 - DNA, 479 bp, Homo sapiens
  misc_feature (1)...(479): n = A,T,C or G
caaaaggtgactagacatacttggaagttcaaagcagtaggatgtagcttgcagggaaaagaaaacccttttccatgttgttaggcagaagtatatcaaatatatcccaattccacttgataaagtcagnttggatgacctccttnaaccaatctanggcanaacacttagtaaaagcgggccctgggtggggatgtgaatccaggagaagaggggcaccannatcccatgcagcgccaaacacatccattccaccctctaacacatacgangcatgtcaccccattgccctggacacaagatntacnataacagnnagctaatgggcactgctcccacngnctggggntttctaatgggctttaaaattcaaggccntggaaaaaaatccttttaccccccaancacnaaacttggcctttngacctttccnncatnacaggatnttntggggggaaaattctttnggntccccatac

SEQ ID NO: 170 - DNA, 315 bp, Homo sapiens
  misc_feature (1)...(315): n = A,T,C or G
aaattgctacgtcagtacaccaaggagtctagtgatctacatgactacatgaaaagcttgaattatacctgngatccaatctccagctcactgaatcagtggcggggaagggaaaaananaaaangangnaaaaaganagatttcattaatagnnccttttnaaactccaaaatnntctgcatttaagcncatncaatcaggtaccttaaagangaccatttttgttctttgcaatttgtataccagaancactccttccanactcacntgaatttatttccttcccaatncntgacaatgcccttggncttgaa

SEQ ID NO: 171 - DNA, 625 bp, Homo sapiens
  misc_feature (1)...(625): n = A,T,C or G
aaattatttcactgaagctgagattattagtgatacaaagntaaaatttcaatatttaatttctctatatattattaatattaaattgttttttacttataaattcatgttctcatctgatttaatattaaatttgtataggtgggcgtttcttaccattttgcacaagtttttgtttttctgaaacacttaattgtgcaggntgtaaaaaagattagtgcattttcattttaaggatgctttgctccttaaattgttcgacagaaatgactttttagggaaagtagnttttttggagctactaactngtatttattattgtacatgcataaccagggtggtgagggcactaatcttgtaggaaacacttacttgatgttttatttgaacttttcctatangntaacttttctgnatagaattaacactaggaacagtgtcatgaaatctgggttgaaggagaatacagnatatatgagaaccttaaagntcaaataggaaatcatttctgaagacaaaaccagaggaatnttgntcagngcccacntaatgggangaanaangggcggcatttacnctgggcaagnatttgagaagannggcntaaagaanngggaacttacnt

SEQ ID NO: 172 - DNA, 632 bp, Homo sapiens
  misc_feature (1)...(632): n = A,T,C or G
cctggcttcttcgggatgctccagaacaaaggactaacagactactgctttgactataaccctcccgatgaaaaccagattgtgggacaccaggncattctgtacctctgtcatgggatgggccagaatcaagtttttcgagtacacttcccagaaagaaatacgctataacacccaccagcctgagggctgcattgctgtggaagcaggaatggatacccttaccatgcatctctgcgaagaaactgccccagagaatcagaagttcatcttgcaggaggatggatctttatttcacgaacagnccaagaaatgtgtccaggctgcgaggaacgagncnagtgacagtttcgttccactcttacgagactgcaccaactcggatcatcagaaatggttcttcaaagagcgcatgttatgaagcctcgtgtatcaangagcccatcgaaggagactgtggagccaggatctgcccaacaaagacttnctaacaagngaccagaaacccaccanaaactanggttgtattncttttgaagaagcaatcatttngccttttgtgaaagtgtggttggatttaattaaaaaaggggaataaactttnggactttttttggaaaacttttttacct

SEQ ID NO: 173 - DNA, 271 bp, Homo sapiens
gaactagccaacttaagaattacaggaagaaagtggtttggaagacagccaaagaaataaaagcagattaaattgtatcaggtacattccagcctgttggcaactccataaaaacatttcagattttaatcccgaatttagctaatgagactggatttttgttttttatgttgtgtgtcacagagctaaaaactcagttcccaaatccccagtttatgcagcgccatcaggtattttaagctaaacttcttcacccctgagagcatgtcag

SEQ ID NO: 174 - DNA, 311 bp, Homo sapiens
  misc_feature (1)...(311): n = A,T,C or G
atattttccaatttgctgggatgtcacctagcaatagcttggattatatagaaagtaaactgtggtcaatacttgcatttaattagacgaaacggggagtaattatgacacgaagnacttatgtttatttcttagtgagctggattatcttgaacctgtgctattaaatggaaatttccatacatcttccccatactattttttataaaagagcctattcaatagctcagaggttgaactctggttaaacaagataatatgttattaataaaaatagaagaagaaagaataaagcttagtcctgtgtcttt

SEQ ID NO: 175 - DNA, 307 bp, Homo sapiens
  misc_feature (1)...(307): n = A,T,C or G
ttggtgcagaaagtgagattgaaatgtagtttctttgcaggttatattcccagaggatgtcagtcccaaggaccagnagctgccatcagtttggattctgaaaactaactggcatcaacnctgggtgtagaaacatgcttgccttatgtatcanaggacatgctcagcngatccaagagatatatttggcaactttttctanaaaaggcacattgggnatcattcattacattcttgagtttttttgggtttttttttttttttttnaaaacancnttgttntttccccngggtgggaggggggggg

SEQ ID NO: 176 - DNA, 355 bp, Homo sapiens
  misc_feature (1)...(355): n = A,T,C or G
aaaaacaaaaacagaatgttgtacgtgaagattctaggaggggagggaccagcaaatctgagagaaccgtcctggggcctcccttcgaggagccctctgatgtgaggagggacttgagttgagtgacgcttgtggtgtgaggtgttctgagctcactgaccggaaggtccaggtgaatctcgncataagtgatctcaggctctcacaggatccggagggaaatgtgttagagggtctggaaaattcagtgcttttgagttacttgtttttattaaaaatttcctcacaaaagagagtcctcaagttgtggctgttcttgggaaaggggtcaccgtgtctgacaaagtgtaacttt

SEQ ID NO: 177 - DNA, 469 bp, Homo sapiens
  misc_feature (1)...(469): n = A,T,C or G
cctgggctgggaaaaactttggaaccanactcttgcctgtttcccaggcccactgtgcctcagagaccagggctccagcccctcttggagaagctcagctaanctcacngtcctgagaaagctcaaaggtttggaangagcanaaaacccttgggcctgaagtaccngactacatggacctgccttgcntangagtttgnaggaagttggagntttgttttcctctgttcaaagctgtctgttcctaccccatggngctaggaagaggantggggtggngtcanaccctggaggccctcaaccctgttctccccgagctcctcttncatgctgtgcncccatggctggnacgaacgacttctncttctgttnnccgtnctgtaaaanagtagntttttgttcaatttaatgcttgtnccatgngtgaatacgangggnangagnaacctnctctgagctcntcttttaa

SEQ ID NO: 178 - DNA, 518 bp, Homo sapiens
  misc_feature (1)...(518): n = A,T,C or G
ctggtgcggggccctgcagatgggaccatctcaggctgggtccttgtagcccaggagcacagactggactaagcctcctgggccttgtatgaaaaaggtgttgtacctggccgtttttgccagtnataatcaataaaataaccatantaaaaatcaaaggctctgttctgaccactcttcangtcttccgctgaaacggaaaagtgcaaagcaattgaagtacatatgcagnttgtcttaacctcaaatagtgccagtcccacttctttcctctgatagtttgttcaagctcagcaagatgcagaggggctggcctgttctccttttgatttcctccacaaggacttctcttcngacatccacctcttccctgctcgcactgaacggagcttgatgaccccatccttgagttccttgctccccgatgatagccaccancgggatgncctgccttctcacaagnactgnactggttcagcanctttgggttctctttgtcanacctcaacctnatccat

SEQ ID NO: 179 - DNA, 407 bp, Homo sapiens
  misc_feature (1)...(407): n = A,T,C or G
ccatgctcacccagccaggcccgtagtgcttcagtttgaagatctcatcggggaagcgctnaccgtanatgctctttcctcctgtgccatctcncctggtgaagnctccncccctggattnatgaagcccttgattacaccaatggaantttgcttgttntttggagccaaaatcctttctctcctngtanctaaggccacaaaacttatccactgttttttggaacagtctttccgaagagaccaangatcacccggcctacatcttcatctcnaattcgctatgtcaaaatacaccttgacggcgactttgggcnccttcttcttctcatccgncgnaaaaggtccacctccngctcncgaccacgctaanggcgaatttcanccacactgngtgggacgatact

SEQ ID NO: 180 - DNA, 505 bp, Homo sapiens
  misc_feature (1)...(505): n = A,T,C or G
aaaaatgtaacaaacatctaaatatctgacaataaaatctgaaatgctgtaacttcaacattaactgcaccatccaaattcttgtgacttacgcatttttgcccaatttaacctttctgatgttcccctgcccccagacaccataaatgcattgtaattttgaaaatatctgccaactacacactgaaaattttaacccgatcaattgacataatataaaatctgtcccaaagcactgaaacaagaaaatctataccatcatgctacagacgtacttagaaaacttaaaaggaagagtaaatatcagctcagtgatttataatgaagctaataaaattcaggccagtattcttaagtgtaatgaacattatttgaacattcaacacatgaaaggttaacaaaggctatgaacttggtgtaacttaaaacgtttcagatgtcggagttcacccagatgtaattgggattcaggngggatcccgccgacctcngcccgcgaccacgc

SEQ ID NO: 181 - DNA, 441 bp, Homo sapiens
  misc_feature (1)...(441): n = A,T,C or G
aaaatgtaaaaattaatcgaatatctatgaaagggcacaggaagctagatattttaaggaaggaaggtacgctacttacaaagttaacttgtaaccacacaggaggggtaaagattctagagaagagcactttggttaactctatacgctctgtggctctacccattcataaacgagtctctatgcataaatgagtcaccaatagttaagattaccaaatatatttcaaacctaaaattaaattatccaagttgtggtccctttattcaaatggnaagtatatccatgcacngaagtccaaatatnttaaaaggaattaaaattaaattgcatatatcatattccttcaatagttngagggctattgcttttaacaagattagtattattccattttaatacgtcaggagtacataaacacaagtacacctgaaatacacc

SEQ ID NO: 182 - DNA, 387 bp, Homo sapiens
  misc_feature (1)...(387): n = A,T,C or G
ggctcacattgcatgcaagtttgctgagctgaaggaaaagattgatcgccgttctggtaaaaagctggaagatggccctaaattcttgaagtctggtgatgctgccattgttgatatggctcctggcaagcccatgtgtgttgagagcttctcagactatccacctttgggtcgctttgctgtcgtgatatgagacagacagntgcggtgggtgtcatcaaagcagtggacaagaaggctgctggagctggcaaggtcaccaagtctgcccagaaagctcataangctaaatgaatattatccctaatacctgccaccccactcttaatcantggtggaagaacggtctcagaactgttttgtttcaattggacctcggncncgacc

SEQ ID NO: 183 - DNA, 403 bp, Homo sapiens
  misc_feature (1)...(403): n = A,T,C or G
aaaacgcctacaaacagccttttttttttaggcaacaaaatacgtccagtccttgacatnttntcatactcacctagcaccacanatgcaaggacctaacagtaaacatgnncaatctcntgnttaaccctaaagcatgcactgaattgaatttgtttgntgngatctatcctactaagaatgcaatacatactttttcttactaatattttatacattaaattaccctgcagcattttgaaattttaacantgatgnaaaacancttttnaaagatttatnaaacaagtttcnaggttcaccttcaggctggtttggntaagtggaaaaatggcagcanccnnaaggttcatactgaatgaaaatggngttgggtgcatgtcaacccatgtaaaaaatacct

SEQ ID NO: 184 - DNA, 341 bp, Homo sapiens
  misc_feature (1)...(341): n = A,T,C or G
ctggaggatgcatttctgaccccatcccagacacgtgaaagcagaagacatgatgcatctataataatgaaagcacaatctaaanagtattatcacaccgtgaacagcctcttcctgacccacagcaaatattaagagaaagacattttatttacaaacaaganttaataatgctcacaagaatanagttngcccccaaatggaaaantacacattattttgtttcaaaaagcnataaatttantgcttgaaaaatccancaggtaagcatnaaggactaacagggtctgttcctggaactgtccgccagcaaatgancatgctcttgtcctgggaagcca

SEQ ID NO: 185 - DNA, 381 bp, Homo sapiens
  misc_feature (1)...(381): n = A,T,C or G
aaaattgaaactgatggaacattctttcttgntcttcaccatctgacaaattgaatggcaagaggcggattttgccagtttcttttcactgatgcagatttgngttaanatagctctgaatggangntttataaactggccctgagcatcnataaagnatcagtatctgacctttttttaaccttctaggaatttgaaataaatgtgtttgtgttgnctgattagatgatcattggtgtcttgccacaatgtttaccttngccgccgacacgctaagggcgaattccagcacactggnggncgtactattggatctacntnggtccaacttgcntaaacatggcatatctgttctgtgaacacncccttccttcnttnttt

SEQ ID NO: 186 - DNA, 136 bp, Homo sapiens
  misc_feature (1)...(136): n = A,T,C or G
ccactttattccatataacacttaaccagatatcatttacatctgaggaagagatggcccatgagactgatctatngcaaaacactctaagaaatgcagtccaantttatacacttncaggcattncctagacaaa

SEQ ID NO: 187 - DNA, 553 bp, Homo sapiens
  misc_feature (1)...(553): n = A,T,C or G
aaaaagagcacattccattctggtgcacacaaatgtacattaaaaataaaataaaaaagtgtaagagtacatttcaagggaatccctgcctctcccttggctcgctggcaaatgattcacaaccaaaacatttctgggatatgtgacttaaggaataaaaaaactcangtgttttataaaagggaatggcaggatgaggaaatgatttatcaagatacaattttactaataattacttctcaaataacttaaaaatgttttataacaaaaaatcaaaatgaaacaaaactnggtangttgaatataagtattttcaactgntacaatacttgaggagatttttcggcctaatttctcagaaactcgccnaaagaatagctattctttacacagaatancttaaaaatttccatgnggaagcnattattttaggaattccaaaacttntttttttcaaaatgacatacntaatttccttgaaaatttnttgnnaaagggntcntaaanaattaaacnaaaccctgtccngcgcttttttttttctttttataac

SEQ ID NO: 188 - DNA, 299 bp, Homo sapiens
  misc_feature (1)...(299): n = A,T,C or G
ccacagaagttgctgctgacgctctgggtgaagaatggaagggttatgtggtccgaatcagnggtgggaacnacaaacaaggtttccccatgaagcagggtgtnttgacccatggccgngtccgcctgctactgagtaagggggcattcctgttacagaccaatganaactgganaaagaaaganaaaatcagttcgtggntgcnttgtggatgcaaatctgancgttctcaacttggttattgtaaaaaaaggagagaaggatnttcctgtactgactganactacagtgcctntcct

SEQ ID NO: 189 - DNA, 598 bp, Homo sapiens
  misc_feature (1)...(598): n = A,T,C or G
aaattattgttaaagaatacacaatttggggtattgggatttttctccttttctctgagacattccaccattttaatttttgtaactgcttatttatgtnaaaagggtnatttttacttancttanctatnccagccaatccnattgccttctgnnaaagaaancaccnnaaatccctcangtcccttggtcaggagcctctnaagatttttttgtcanaggctccaaatanaaaatannaaaagggtttcttcattnatggctagagctananttaacttcantttctaggcccctcaagaccaatcatcaactaccattctattccatgctttncacctgcgcattttcttgtttgcccccattcacttttgtcaagaaaaccttggcctcttgctaaaggngtatttgcccctttgacaaancngggancaccctaccanggacactatnactcattctggtgngcaatggtnncaaactataaagactgccntggtgcctaatnccccttngggaaaatgtggncttnttgactnagnangattataacctacggacctggcctggccngcncgtttcaaaggggnaaattccc

SEQ ID NO: 190 - DNA, 323 bp, Homo sapiens
  misc_feature (1)...(323): n = A,T,C or G
aaaaaaatcaacagtgttaacagtgggtgggtatgtttccagacctctcaattcactcatatgtacagacaggattgacggggggaatccctaaactttttattctaacaagttttatttatttatttccttttttgacatggagtctcgctctgcgcccanctggagtgcaatggcntggnctcggttcactgcaaccttcgcctcccgggtttaagcaattctcctgcctcagcctcccangtagctgggattacaggtgcatgctacttgcgcccggctaatttatgtattttattagagatggggtttcaccatattgg

SEQ ID NO: 191 - DNA, 621 bp, Homo sapiens
  misc_feature (1)...(621): n = A,T,C or G
aaaatgttttatttcatagctcataaaaaagcatgtatgtacaagactcaagtaaatagaaaggcagctttcaatcacaaatcagtttttcagattttactgnggaagcatatttaatgcacacatttgaatgttacacntaaataattttaacgatggagtccaagctctggattttacattagatctgcatatataagacacttgtggtcaaatttcaagattggnaaagccagnttcaagctgcttatattttgagtacaggnttcactattacaaatatatgatgttaaactaacaaactcatgaccttcaaagatgtcttcgtcccacgcacacacattngtaatttgtgccatttgctatttccctttcttctataatcttcaaagtatatagttatgcattgagttcctatgcatcttcaccctctcctttatctgaaacnggaaaaagcacagaaaaaaatctnaataatttttcaatctttngtcatcntgaaaatagcnttaaatanaaatgaaatnaangaacacaagaaaatttttcccccattataanacttatttcctgcccngcggccctcnaaaggcgaaatccacacnattgcgnccgttactt

SEQ ID NO: 192 - DNA, 628 bp, Homo sapiens
  misc_feature (1)...(628): n = A,T,C or G
aaagtacattatgagaacaacagccctttcctgaccatcaccagcatgacccgagtcattgaagtctctcactggggtaatattgctgtggaagaaaatgtggacttaaagcacacaggagctgtgcttaaggggcctttctcacgctatgattaccagagacagccagatagtggaatatcctccatccgttcttttaagaccatccttcctgctgctgcccaggatgtttattaccgggatgagattggcaatgtttctaccagccacctccttattttggatgactctgtagagatggaaatccggcctcgcttccctctctttggcgggtggaagacccattacatcgntggctacaacctcccaagctatgagtacctctataatttgggtgaccacgtatgcactgaaagatgaggnttgtggaccatgtgtttgatgaacaagngatagantctcntgactgtgaagatcatcctgcttgaaggagcccagaacattgaaattganaatccctatnaaaacaatcgtgccccagaaganctggnctacacctatctggacacttttggccgcctgngaatggtngctacaagaaaantttggagaacacncattangacat

SEQ ID NO: 193 - DNA, 395 bp, Homo sapiens
  misc_feature (1)...(395): n = A,T,C or G
aaacaaaacaaaaaaaagtttacaaaagaaaaaaagatacagaaaaagaataacttgcttcatatgtcccaaaaaganaaaaaaataaaggggacaatgccaacatgctnaanaataaaggcttcttttncttatttttttaatacaaaatacaagcaaaggatacacatacttaaaacagagctnaggagcagacacgcagtcctggaaacccttnaatnaaagcaaagcaggaggttgttttttctttgtctatgcagatacatacagagactgggatatgtaaaaattaagtatcncaaaagaccatcacacgattctaccaatgcatgttgcatcttgtaattnacgaacatggtcaacaaaatcatgttnacttcaaccccatttcattt

SEQ ID NO: 194 - DNA, 269 bp, Homo sapiens
  misc_feature (1)...(269): n = A,T,C or G
aaataatacagaacaattaaagctaaccaagcgcaacagataaataagcctgccagttatacacataactttataccaaccataattcagccagtcaaaattccaaaaacaatccaaataacttcaacatactatgcggtcaaactaccgaataaacttgatgcanaccanctattctcaagttgcaatagtatncaatgactttgctgaaatgcataaaatggacaagcctatgtatctgcgcaaccancaggtttttttttatttta

SEQ ID NO: 195 - DNA, 179 bp, Homo sapiens
  misc_feature (1)...(179): n = A,T,C or G
aaacataaaagtgtttgtttctgttatgttaccataatttgatgnatatagtgtccananccatttagaaatttaatatttattaataactgaaactgtttgtcttcctttggtatatagtctcgcatattatattatatcangccangataaaattttgacagctctttannccacat

SEQ ID NO: 196 - DNA, 187 bp, Homo sapiens
  misc_feature (1)...(187): n = A,T,C or G
cctgggctcgcctggaccacaagtttgacctgatgtatgccaagcgtgcctttgttcactggtacgtgggtgaggggatggaggaaggcgatttttcattaggncccgtgangacatgnctgccnttnanaaagattatgatgangttggacatnatatncctnactgatanagatnanggttaata

SEQ ID NO: 197 - DNA, 76 bp, Homo sapiens
  misc_feature (1)...(76): n = A,T,C or G
aacatcctggtgtttgacctgggnggcggaaccttnnatgcgtctcttctnaccattgacaatggatgtattcnaa

SEQ ID NO: 198 - DNA, 170 bp, Homo sapiens
cctatctggttggcctttttgaagacaccaacctgtgtgctatccatgccaaacgtgtaacaattatgccaaaagacatccagctagcacgccgcatacgtggagaacgtgcttaagaatccactatgatgggaaacatttcattctcaaaaaaaaaaaaaaaaaaaatt

SEQ ID NO: 199 - DNA, 626 bp, Homo sapiens
  misc_feature (1)...(626): n = A,T,C or G
aagacatcccagcacagcatatcacgctgtttcttaagtatttgtatttcctgtacctgaagtgtagcgaaaatgctactatgactcttcctggaatacacccacctaccttgaaccagattatggattggatatgtctacttctggatgcaaattttactgttgttgtaatgatgccagaagcaaagaggctactgataaatctttacaagcttgtaaaatctcagatatctgtttattctgagctcaacaagattgaagtaagttttcgggagctacagaaattaaatcaagaaaagaataatagaggattatattcaattgaagtgctggagctcttctgatattatcaattctccttcatanacattttataaagctcttttatgtgaactcttgcttcatccaggcaagaacngggtttgtttgcgaccatctcagggtcaagagaaacgtgacagtgagtacctggacccttcacttaactgatgctccngggtangactgcaggttcacatgaccctgttctangctgtggaccattggnntgnagaggnctgcaattttttaccttgcccnggcgccgctcaaaaggncgaattcnacnanctgtcggntgtntagcg

SEQ ID NO: 200 - DNA, 313 bp, Homo sapiens
  misc_feature (1)...(313): n = A,T,C or G
cttagggagctgcanttgaggaattgtctgcgtatccttatgggggagctctctaatcaccatgaccatcatgatgaattttgccttatgccttgactcctgccatttatcatgagattaatactgtgattcccgctgttttcttttccttgcattttcctaatatgcctttactgatccgnttgctgtgaaccctatgctattccatgtgtcaagtgggccttgtgtctgccagcttctatttgaagattgcctttgcactcagtgtaagtttctgtcagcantagtttcacccatttgcatggaaaaattt

SEQ ID NO: 201 - DNA, 81 bp, Homo sapiens
  misc_feature (1)...(81): n = A,T,C or G
ccacagtgaagagggagtaggggactcacccctcctgccttcctgtnccnaagggggctgntcaacctatnacggnganta

SEQ ID NO: 202 - DNA, 115 bp, Homo sapiens
  misc_feature (1)...(115): n = A,T,C or G
gctgatcctgtttatttggcaggaaaacnanacaatccagcancccangagggacaggtggacttantcctnctcctcntcnactccanccccanncccaccctggtccttctng

SEQ ID NO: 203 - DNA, 318 bp, Homo sapiens
  misc_feature (1)...(318): n = A,T,C or G
cgaggnctgtattttggntttctccctgtcccttcctttttnccctattctttggcagcttgtatcaaatgntacagtttatnttgtggaataaatncttcncctaacataacactnantgctcattnatttaaaagcttttnnagcacaantttcttntgccccntttactgntgcacactcatnaanggggntgcnttgcttttgcctctgncccaaccacggttncatntatcacttggatgntancctgnaaacaacattatagggattnacactgccttntgcggncnatcataattggcgantttctacaca

SEQ ID NO: 204 - DNA, 274 bp, Homo sapiens
  misc_feature (1)...(274): n = A,T,C or G
gcctcatacatgccctgaggccagcangcgcccanctcangcaacacacgccttcacttaaaaaggccgaggagcggcgggatccacctnaatccaattacacntggtgaactcccacatcttaaacggtttaagtcacaccanagctcatagccnttgttaanntttcatgngttgaatgttcaaataatgttcattacactnaanaatactggcctgaaaaattatttatcttnattattnaaaacactggagncttnataaaatacttcat

SEQ ID NO: 205 - DNA, 110 bp, Homo sapiens
  misc_feature (1)...(110): n = A,T,C or G
ctgtcatcacgtcttccaccacaggaatggagccatangagcaagcctcatanattcgatagcattctgtgtttactccgaccgggcacaatgtgatatcactctgaaaa

SEQ ID NO: 206 - DNA, 153 bp, Homo sapiens
  misc_feature (1)...(153): n = A,T,C or G
aaaaacaaaaacagaatgttgtacgtgaagattctaggaggggagggaccagnaaatctgagagaaccgtcctggggcctcccttcnaggagccctctnatgtgaggagggacttgagatgattgacgntgcngagagaggttttctnaaact

SEQ ID NO: 207 - DNA, 150 bp, Homo sapiens
  misc_feature (1)...(150): n = A,T,C or G
aaattgtattgaacagggcatataaaatgcattctgtaccctgatctggcatatancttcaaaactgcagnggcnagtgtccatctcttagaatagctaccttaactgtccnccccttantntctgtgcnatccnctctctgcnttgttt

SEQ ID NO: 208 - DNA, 228 bp, Homo sapiens
  misc_feature (1)...(228): n = A,T,C or G
ccaggggtgctaagcagntggtggtgcaggaggcattgctgatgatcttgaggctgttgtcatacttctnatggntcacacccatgacgaacatgggggnattancananggggcaaanattatnacnccttttncnttcccccctgcacaatgaatacccnngtctcttnncatgcccnggtgnagaganccccccctgtgncttatacntacnttntcttcttccc

SEQ ID NO: 209 - DNA, 505 bp, Homo sapiens
  misc_feature (1)...(505): n = A,T,C or G
aaaaaaacagaaacaaatcaacagctctctacatcatgcatgggtagntttcttaccccatctttttttttcctcaataattaacgcanagaaaccattgtttgaaaagaatntgaaaacttgctacagaaacacccggngaaanagggtgtggggcatattcatgccctagaatgcgcctaccacagtgtagctnttcataaatgcaacattgtagacatanatgaatccaaagtattcagcagttttcctccgntcagaagactaaagctccagnnngacaatgctcantgaggcttcacagccactggagggcaccattacccattcatcttgacatcncatttccatacaaaaggaccttgcccgggcggnccgctctaaaggggcgaagttccanncccacttggcggncngtttacntagtnggaattccgaccttcnngtacccaaagcttttggtcttnaattnnattngggccattagcttgnttntctctctgtc

SEQ ID NO: 210 - DNA, 400 bp, Homo sapiens
  misc_feature (1)...(400): n = A,T,C or G
aaaaccatgaaagaagttgaaggcagcattcctcagctctgtgacttgtgaccctatttgaagtttcaggatttgggtgtcacaaaggattgtccctaatccttggccctggggtcttccgagtgagctggtttaatactctgagaatgagcagggagatccagagaatgaatccctgaccgcatcacctaaactgtcttccaaacatgagacaaagctgactgttcacactgattgcccagcacataccgtcttgccagtttcttcttttctcccagtctcctgttcatccattctgntctcccttggggtgggaatctatgatggaggttactggggaaacagctcacagatttttggagaccaaaccaaaggtctcactaggaaatttatctgtttt

SEQ ID NO: 211 - DNA, 606 bp, Homo sapiens
  misc_feature (1)...(606): n = A,T,C or G
caaancaaaattnngcccancgtctttctttctgnnttatgacagaccancctccagccttggtgtggtatctacatgtagccctgcgtaccctgcttctttttagcattcaagacccactcagggcctcaaattagccaatggtgaatatggatataggacttttagagggatgcaggttgagttgtacataacttagaggtgaagtgcaggtccgaaacagggctanactttggagaactgtaaaatggctcactgagcatgacagcatcangacccctggagtggctttcaaacttaccttcttctgcaggctacttctggaaatccctaggacttaccagctttctgaacactgcgcatcatgggagggtgaagaggaaaaggggctagttaaaatcttgcttctactgtgggccgaactcangaggagncctaaagctaagcccttgggcttgacagctctacttttcacctctaactaccactgtgcccaatgantgcccgagtgccaagatcaanacctcggccgcgaccccgctaagggcgaattccgcacacttnnggccgttactaatggatncgaacttcggncccaacttggcg

SEQ ID NO: 212 - DNA, 584 bp, Homo sapiens
  misc_feature (1)...(584): n = A,T,C or G
aaacaaggtttccccatgaagcagggtgtcttgacccatggccgtgtccgcctgctactgagtaaggggcattcctgttacagaccaaggagaactggagaaagaaagagaaaatcagttcgtggttgcattgtggatgcaaatctgagccgttctcaacttggttattgtaaaaaaaggagagaaggatattcctggactgactgatactacagtgcctcgccgcctgggccccaaaagagctagcagaatccgcaaacttttcaatctctctaaagaagatgatgtccgccagtatgttgtaagaaagcccttaaataaagaaggtaagaaacctangaccaaagcacccaagattcagcgtcttgatactccacgtgttctgcagcacaaacggcggcgtattgctctgaagaancagcgtaccaanaaaaatnaaagaanangctgcanaatatgctaaacttttgggacctcggncgcgaccaccctaagggcgaattccacncacttngcgggccgtttctanngggatccganctcggtacccaaactttggcggtaatcattggncataaccntgg

SEQ ID NO: 213 - DNA, 419 bp, Homo sapiens
  misc_feature (1)...(419): n = A,T,C or G
ctggatgaagttgtgtcagagaaccagaggcttaaagtccctantccaaagcgaagagttgtctgtgtgatgatagtattggcatttataatactgaactatggacctatgagcatgttggaacaggattccangagaatgaaccctattgtgagccctgcaaatnaaaggaggcaccttctaggattttctgctaaagaggcacaggacacatcagatggtttatccagaaaaacagctacanatatgatcattctgtttcaaatgacaaaccctgatggtgctaactgaanaaccattgctttacattcctccacctccttgtcagcccctnnttaacacancagagtctctcangntaaaatcatgaacttcnagggatgggttcatatnaccttaaantancaaaggacccatgt

SEQ ID NO: 214 - DNA, 318 bp, Homo sapiens
aaatatcacaagtaggtcttaagtgtcatctggcatcttctttctgtagccaggtaactcttagatcttattcatcagcctgctgaacagttcctttttcagagacatagataccatccaaaaatttcctgatatccttgtttttaactgttgtggcttgctgaatcaaagccgctgaatttgaaacaagctcaatgtcatttccttcaaggattaattcatctttctgggcttgagatactgaacaagcaacacctggtctcatccgaaccctgcggatatatttttcacccaagaaatttcggatttcaacaagag

SEQ ID NO: 215 - DNA, 450 bp, Homo sapiens
  misc_feature (1)...(450): n = A,T,C or G
cccgacttctgctggcatcaagaggtgggagggccctccgaccacttccaggggaacctgccatgccaggaacctgtcctaaggaaccttccttcctgcttgagttcccagatggctggaaggggtccagcctcgttggaagaggaacagcactggggagtctttgtggattctgaggccctgcccaatgagactctagggtccagtggatgccacagcccagcttggccctttccttccagatcctgggtactgaaagccttagggaagctggcctgagaggggaagcggccctaagggagtgtctaagaacaaaagcgacccattcagagactgtccctgaaacctantactgccccccatgaggaaggaacagcaatggtgtcagtatccaggctntgtacagagtgcttttctgtttagtttttactttttttgttttgttttttt

SEQ ID NO: 216 - DNA, 747 bp, Homo sapiens
  misc_feature (1)...(747): n = A,T,C or G
gcgccggagctgggttgctcctgctcccgtctccaagtcctggtacctccttcaagctgggagagggctctagtccctggttctgaacactctggggttctcgggtgcaggccgccatgagcaaacggaaggcgccgcaggagactctcaacgggggaatcaccgacatgctcacagaactcgcaaactttgagaagaacgtgagccaagctatccacaagtacaatgcttacagaaaagcagcatctgttatagcaaaatacccacacaaaataaagagtggagctgaagctaagaaattgcctggagtaggaacaaaaattgctgaaaagattgatgagtttttagcaactggaaaattacgtaaactggaaaagattcggcaggatgataccaagttcatccatcaatttcctgactcnagttagtggnattggtccatctgctgcaaggaagttttgtagatgaaggaattaaaaccttagaagatctcagaaaaaatgaagataaatttgaaccatcatcagcgaattgggcttgaaatattttnggggactttngaaaaaaanaattcccnctnaaanaagatgtttccaaatgccaanaatattttnncttaaattgnaagttaaaaaaaaangggaatnctggaataccatttggttccantctntggggcaattttcnaaaaanaaggtccnaantccaatnggcgacaattggganntttttcctnanccatcccnc

SEQ ID NO: 217 - DNA, 693 bp, Homo sapiens
  misc_feature (1)...(693): n = A,T,C or G
aaatatcacaagtaggtcttaagtgtcatctggcatcttctttctgtagccaggtaactcttagatcttattcatcagcctgctgaacagttcctttttcagagacatagataccatccaaaaatttcctgatatccttgtttttaactgttgtggcttgctgaatcaaagccgctgaatttgaaacaagctcaatgtcatttccttcaaggattaattcatctttctgggcttgagatactgaacaagcaacacctggtctcatccgaaccctgcggatatatttttcacccaagaaatttcggatttcaacaagagacccattctcctggataacaacgttgatggggaagtgagcatacacagacctcatcttgtaacggaagcccagtgtaacacccttgatcatgttctgtacatgactacaaatagtccgaacggnagccagttcctttctgttaccccccatttgtcaacccggaacctcttttttttcttttccagaangctgagttctcattgatgtgattgaaagncctncccaggggtcctctggggcccttacgaanactggcgtcccttcagaataatgtcgacattttctggaatgtcnacagctgatgctganaatagcttnacctgncccggcggccctcaaggngaattccacacactngcgcggttcctangatc

SEQ ID NO: 218 - DNA, 327 bp, Homo sapiens
cctgttctgggagatggtcatattcacctgccaaaatctgctggaatcctttgatggtctccttcaggggtaccagcttccccatatgacctgtgaagacctcagcaacctggaatggctgagacaagaaacgctgtattttccgtgcacgggacacggtcaacttgtcttcctcagaaagttcatccatacccaggatggcaatgatatcctggagggatttgtagtcctgcaggatcttttgcaccccacgggcaacatcgtaatgctcactgccaacaatgttgggatccatgatacgagaggtggagtctagaggatccacag

SEQ ID NO: 219 - DNA, 778 bp, Homo sapiens
  misc_feature (1)...(778): n = A,T,C or G
aaagtgagcagattcatatttacagtgtgatttttaaggactgtctatatccaaattttattttcgtgaacgcttacattctaagagcagtacaattagcctattacgtagggccctaatcttgttagtatagtgttgttgaaatactttcttcagcttttgccttaacaaatccaaagatggaagatgatgacaatctggaatattcaacataacatgaaaaaattcattccacatatccaaatgaggaagccttctaaaaagaccttcaggcttacactctcctccttcatttttcactttcatgtaagtgccaaagagcatgcaatatactgttgcagcaaccccaaagtaatcgatctggtagttccatggtttgttgctgancatctcaacacactgaaaaccagatgtttcacactttgctgtgaatatagttccttttggaaaaagtttcatatctatactcttgacccaggtcaatcagtgccaagcccagcagaataaatcatctttcatcatcctgttnccaaaaaatccgttttccaantattgaaaattgnctngggtttaaaggtctcccttgaatggaatttncacaagtcattgccccttggcttcaaatccattgtaaaanncaatttcntcattngccnaaaaggaanatggaacnangaaccctttganggcnttcacntttttttcaaggggggtaattttttttattanaagggttaaatngggnanttttaaaataaaatggnttncccattaaacc

SEQ ID NO: 220 - DNA, 312 bp, Homo sapiens
gaggaaaggaagatgcactggtcaccaagaacctggtccctggggaatcagtttatggagagaagagagtctcgatttcggaaggagatgacaaaattgagtaccgagcctggaaccccttccgctccaagctagcagcagcaatcctgggtggtgtggaccagatccacatcaaaccgggggctaaggttctctacctcggggctgcctcgggcaccacggtctcccatgtctctgacatcgttggtccggatggtctagtctatgcagtcgagttctcccaccgctctggccgtgacctcattaacttgg

SEQ ID NO: 221 - DNA, 332 bp, Homo sapiens; identical to SEQ ID NO: 23

SEQ ID NO: 222 - DNA, 439 bp, Homo sapiens
  misc_feature (1)...(439): n = A,T,C or G
ctgattcagatcagagggaaagaaataccaaccctgcaataagtgtactaaactctacgctctggttaatgtaatgtactctcctggactgaatgcagtgtataatttctgtctacagctagaagctgtgccccagttccacatttgattacacatgtgagatttgctgctgttgcagtataaacactaggtataataggatttgaaattgcattacagttcataaaaattgaaaatgagaaattaaacctgcaagtgaaacatttgaaacgattatactttctacataagacatggttgggacatcagatacttacaaagatggtttaagtatggatactagagaaaattaagttttctttctctttggtttattgatttggnttaatttccattatgctattttgcataatcaaggcactgtaaatcttataatttt

SEQ ID NO: 223 - DNA, 721 bp, Homo sapiens
  misc_feature (1)...(721): n = A,T,C or G
aaaaaatcatacggacaaacaactttcaaacaaaactggattagtaggatttcttgcctgcttaactaacatgacagacttcttgtcccaagcccttctcagaaaaacctcatgtggaaaccaagctagagataagaattcttccctgatgcagttaggggaaagggaaaggctagaaacttctttggcaagcaattccacacacagccatttatgtgtgagtgctctgcttcaagcacagtacactctttgcagggacggccagatgttcagagtgggagtggtacttttcaaccagctaaaagtgcagaagtcatctagtcgtctgcctcttcccactgccagtgcctgcagccttgcagcaacttttaaccacccctatggactggaatattgagttaaaagccaangctgagctggctgacgctgtagtctccattgaaaaggaaatggatgggatggaaccgagaaaccccagtacatgatgacactcaaaagacttagggggaaagagaaggaaggatttcagaaatgggggacagactnggnggaaaatggttgggctnaactnggaangaaatgggggatacctgnagttaatattgtncatttcgaaaccaatcaagttgcctcctggaatggcaaaaaatcaaatggnggaaangggaaccttccttgatantttaggggccaacagggattgggaaaanacttccttgaa

SEQ ID NO: 224 - DNA, 665 bp, Homo sapiens
  misc_feature (1)...(665): n = A,T,C or G
ggaacctgccatgaacccaacaaatgccaatgtcaagaaggttggcatggaagacactgcaataaaaggtacgaagccagcctcatacatgccctgaggccagcaggcgcccagctcaggcagcacacgccttcacttaaaaaggccgaggagcggcgggatccacctgaatccaattacatctggtgaactccgacatctgaaacgttttaagttacaccaagttcatagcctttgttaacctttcatgtgttgaatgttcaaataatgttcattacacttaagaatactggcctgaattttattagcttcattataaatcactgagctgatatttactcttccttttaagttttctaagtacgtctgtagcatgatggtatagattttcttgtttcagtgctttgggacagattttatattatgtcaattgatcaggttaaaattttcagtgtgtagttggcagatattttcaaaattacaatgcatttatggtgtcttggggggcanggggaacatcanaaanggtaaattgggcaaaaatgcgtaantcnccaanaaatttggatggngccagttaatggntgaagttacagcatttcanaaatttanttgtcanaaantttaaaaaggttnggttaccantttttacccttgccccgggc

SEQ ID NO: 225 - DNA, 720 bp, Homo sapiens
  misc_feature (1)...(720): n = A,T,C or G
gtcctttctctgaaaggatttatgtttttcttcgttagatagtgacttctgagcaagctgatctcccctggcatgctccaacctgattggacaaaggaagctctatggcctgggagagagactattcttaatttttctttcttacaaaaactgatttttcccataaatatttttacttcagaggactaggaccattttgttttgggcccttctgctgaaaatttgtctcgtttaagaggcagctagaatctttaccatatgtatgaatttgtataatttcatttttggatagggataaacttttgcttctgataaaagcctggaatttcatctggtcctcagagcattgcgtgtgtgtcttgctgtagcccggaaaaggttttgtgtaaagattctgggatggcaagttgtttgccttttctgaaaagagaacatacagaacctgtcatctttaagaccttcatcccatggaatctactatacaggangatgcantggggctggagggggatgggcgaaaatggggaacaggaagcctggcctgggnttctggncatgggcctcctaaaaccttaaacttcaangtagaaaatgccctcaaccccctatttataaaccaaaacttttcctggcctccccccaaaccccctanaanaacattacccctgggaattgccccncnccctgggttnggaanncaattnggncaaacccngcccc

SEQ ID NO: 226 - DNA, 308 bp, Homo sapiens
ccttgaccttttcagcaagtgggaaggtgtaatccgtctccacagacaaggccaggactcgtttgtacccgttgatgatagaatggggtactgatgcaacagttgggtagccaatctgcagacagacactggcaacattgcggacaccctccaggaagcgagaatgcagagtttcctctgtgatatcaagcacttcagggttgtagatgctgccattgtcgaacacctgctggatgaccagcccaaaggagaagggggagatgttgagcatgttcagcagcgtggcttcgctggctcccactttgtct

SEQ ID NO: 227 - DNA, 277 bp, Homo sapiens
ccaattgaaacaaacagttctgagaccgttcttccaccactgattaagagtggggtggcaggtattagggataatattcatttagccttctgagctttctgggcagacttggtgaccttgccagctccagcagccttcttgtccactgctttgatgacacccaccgcaactgtctgtctcatatcacgaacagcaaagcgacccaaaggtggatagtctgagaagctctcaacacacatgggcttgccaggaaccatatcaacaatggcagcatcac

SEQ ID NO: 228 - DNA, 648 bp, Homo sapiens
  misc_feature (1)...(648): n = A,T,C or G
aaatgggtaaagccatttacataatatagaaagatatgcatatatctagaaggtatgtggcatttatttggataaaattctcaattcagagaaatcatctgatgtttctatagtcactttgccagctcaaaagaaaacaataccctatgtagttgtggaagtttatgctaatattgtgtaactgatattaaacctaaatgttctgcctaccctgttggtataaagatattttgagcagactgtaaacaagaaaaaaaaaatcatgcattcttagcaaaattgcctagtatgttaatttgctcaaaatacaatgtttgattttatgcactttgtcgctattaacatcctttttttcatgtagatttcaataattgagtaattttagaagcattattttaggaatatatagttgtcacagtaaatatcttggtttttctatgnacattggacaaatttttcattccttttgctcttttgggggtgggatctaacactaactgtattggtttggttacatcaaataaacatttttccctcggncgcgancacccttaagggcgaatttccagcncccntggcggccgttactagggggaatccccaanctncggnccccaancnttgggcgnaatcatgggccatagctgg

SEQ ID NO: 229 - DNA, 693 bp, Homo sapiens
  misc_feature (1)...(693): n = A,T,C or G
aaaaatgtaacaaacatctaaatatctgacaataaaatctgaaatgctgtaacttcaacattaactgcaccatccaaattcttgtgacttacgcatttttgcccaatttaacctttctgatgttcccctgcccccagacaccataaatgcattgtaattttgaaaatatctgccaactacacactgaaaattttaacctgatcaattgacataatataaaatctgtnccaaagcactgaaacaagaaaatctataccatcatgctacagacgtacttagaaaacttaaaaggaagagtaaatatcagctcagtgatttataatgaagctaataaaattcangccagtattcttaagtgtaatgaacattatttgaacattcaacacatgaaagggtaaccaaaggctatgaacttggtgtaacttaaaacgttcanatgcgggagtcacccanatgtaattgggatccagggggatcccccccgctcctcnggctttttaaattgaagncgtgtgctgcctggancttgggcncctgntgggctcngggcatgtatgaaggnttggnttctncccttttattgnngggggcntccatgccaacccttttttnacatttggnattttggttggggtcnattgngggggttccttgtgccccnccgnccaggctccgcgggccggcntggaatcc

SEQ ID NO: 230 - DNA, 377 bp, Homo sapiens
ctgtttacagaaatatagttgcgagtatacaaatgttccaatagaagcaaaatatctttttaatatttaacaagttatcacagatagctaaaaacatagatgcaaatgaaattcccccagagaacaaactgaaaatatctggtatcagtgctctgaaatcccaactatgaaagccatatacacaaaaatgtaacccttatatcattgcaggacaatggaagaaggcagttcagtggttgatcagtgtgctcaagcaaataaaattaaataaaaattaaaaatggcagaatggtagctaaaccacttgagaacaggttaatgaaattattggtactatacttaaaacattaagtaaaagaagtgaatgaaactcattt

SEQ ID NO: 231 - DNA, 349 bp, Homo sapiens
ctgaactagacccaggtgaggcagggctgaaaactgcccttgggctgacttttgataggccatgccttgccactttacaagttctttttgcatttactagtatttaagagtaaccttgagattgggaggaatagaggaggctggtacaaatagatggagacctgctgggatcagtgaatgcctgattaggacatggggctatgcatagcctaagagttataggcttaaagatgtcgagtaactaaaaactgtattgctggccgggcgcggtggctcacgcctgtaatcccagcactttgggaggccaaggcgggcagaccatgaggtcaggagattgagaccatcctgg

SEQ ID NO: 232 - DNA, 273 bp, Homo sapiens
ctggctcaggaagccaagaaactggatgccaagaccccatcccagcggaacaagtggcaacagcaggagttaatagcagagttgaggcggcgccaggccaaggaacaccggcctgtttatgaggggaaggatggtaccatcgaggacatcatcacagtgctgaagagtgtccctttcacggcccgtactgccaagcggggctcacgcttcttctgtgatgcagcccaccatgatgagtcaaactgttagcccccaaggttggggcccgacagg

SEQ ID NO: 233 - DNA, 438 bp, Homo sapiens
ctgttgaattgacagaaaaaattgctcagcttttcagcatttccccttgccagatcagccagatttacaagcaggggccaacaggaattcatgtgctcatcagtgatgagatgatacagaactttcaggaagaagcatgttttattctggacacaatgaaagcagaaaccaatgatagctatcatatcatactgaagtaggagtgcggcgtttcgtgcccagtggctgctccttccttcacctctgaaaacggccctcttgaagggggatatgaatggagatttgaaggtctgcaagaacctgactcgtctgactgtgtgtggaggagtccaggccatggaggcagaatcctggccctctgtgttggcccaagctcttgtggtacacacagattactgcccaatatgcagttctgcagacctcggcccgcgaccacgc

SEQ ID NO: 234 - DNA, 312 bp, Homo sapiens
  misc_feature (1)...(312): n = A,T,C or G
cgagacagttactcaagcagccgaagtgatctctactcaagtggtcgtgatcgggttggcagacaagaaagagggcttcccccttctatggaaagggggtaccctcctccacgtgattcctacagcagttcaagccgcggagcaccaagaggtggtggccgtggaggaagccgatctgatagagggggaggnagaagcngatactaaaaacaancaannctttggaccaaaatcccaggttcncagaancaaaaaanngactggagaacnattctatcataactccccaaggactactcaaaggaaaaaatt

SEQ ID NO: 235 - DNA, 569 bp, Homo sapiens
  misc_feature (1)...(569): n = A,T,C or G
ccttggtcctagcacccactcgagaattggctcagcagatacagaaggtggtcatggcactaggagactacatgggcgcctcctgtcacgcctgtatcgggggcaccaacgtgcgtgctgaggtgcagaaactgcagatggaagctccccacatcatcgtgggtacccctggccgtgtgtttgatatgcttaaccggagatacctgtcccccaaatacatcaagatgtttgtactggatgaagctgacgaaatgttaagccgtggattcaaggaccagatctatgacatattccaaaagctcaacagcaacacccaggtagttttgcttgtcagccacaatgccttcttgatgtgcttgaggtgaccaagaagttcatgagggaccccattcgggattcttgtnaanaaggaaganttgacccttggagggtatccgcccagttctacatnaacctggaaccaagaagagtnggaagctgnacacactnatngngacttggnatgaaanccctggaccattgaccccaggaaggnaantnttgcattcaanaaccccggnaagnaaggt

SEQ ID NO: 236 - DNA, 287 bp, Homo sapiens
  misc_feature (1)...(287): n = A,T,C or G
ctgaatggtgctgacggtggagctcacagagctcctgcattctcaaggtttggatacattctgggaagggtgaactggtgtaagagtcacataatacgtggaggggtgtaataatcaaaaaaacatagcaaaacaccttctgtgcctgagccagggttgagggagccgagaagaaagtccacagctctgccacacgggccagcagtgctcatgtctgctggctgatcctccccaaagcctctcctgccaccttttttttttttttttnaacnaaanaaaagggaaaa

SEQ ID NO: 237 - DNA, 631 bp, Homo sapiens
  misc_feature (1)...(631): n = A,T,C or G
aaagagatttattaaatcatcttatcacaaagatggaaacatatacaaactagaaacatgcaaccatcatcttccacagtcaagtcacaatgtcaaatatttttcttgcctctgcagatgaaaagttcagatcttatacccaactacttactcaccccgaatatttaagtcagtcttcctgaaagtactcagggtagcaagtaacaaaatgcaaacgattatataaagaaagtgcagttaaaagggaaactatgtggcaagtaccctctttcccttcccaccccccaattaaaggcaaacaatggcactttgcccttgcttaacctagattgtcttcaaaaactattaaaatgtaaaagacttaacaaaaaaacaaaaagacgtttaacagatgtcaaaaagctccttagtgtttgaaaataaatgcttaaacaaaagacaacatattttatatcaaacaagtttgaagagccctgaattgcancattctgtncataaacaaacaaaaagcttggtgttaggatttattngtcaaaaggcangaatttcttnaggcnggctaaggnaagggaggngggggggntcgttttttnnggcatttnttcacgggcccngnccgataggggtgggc

SEQ ID NO: 238 - DNA, 426 bp, Homo sapiens
ctcacgttgatgtcaagactaccgatggttacttgcttcgtctgttctgtgttggttttactaaaaaacgcaacaatcagatacggaagacctcttatgctcagcaccaacaggtccgccaaatccggaagaagatgatggaaatcatgacccgagaggtgcagacaaatgacttgaaagaagtggtcaataaattgattccagacagcattggaaaagacatagaaaaggcttgccaatctatttatcctctccatgatgtcttcgttagaaaagtaaaaatgctgaagaagcccaagtttgaattgggaaagctcatggagcttcatggtgaaggcagtagttctggaaaagccactggggacgagacaggtgctaaagttgaacgagctgatggatatgaaccaccagtccaagaatctgttt

SEQ ID NO: 239 - DNA, 451 bp, Homo sapiens
  misc_feature (1)...(451): n = A,T,C or G
ctgttgggccaactacacagaccttactccccttagaacaggaaaaaattataagattgaatttatactggataatgttgttggggtagaatccagaactttcagcctgctggcagagtctgtctctagcagtggcagcagcagcagcagcaacagcaaagcatcaactgtgggtacatatgcccagataatgactgtagtaattagctgtctggttggaagaatgtggctcttggaaatatttatggctgcagtttcaactttgaatataactttaagaagctactaaagtgctgttccgaagaataggctgaaacaaaaatataagaattattagctactttgttgggcaataggcaaaagtctatagcattttcatgaaaatatactaaaaatatttttatgatatataaaatgtactaattagctttacctcggnccgcgaccacgc

SEQ ID NO: 240 - DNA, 341 bp, Homo sapiens
  misc_feature (1)...(341): n = A,T,C or G
cttcaagctaggttttgcagttcccaaccacaacattcttctattttgccaggctggtgcaaagtaattaaagatgtcaatcagaaatgtcaatgagactaaagtggttttgtaaatctcagctatatttagcaacactccatgtagctaatattttttggtagcatctggtagaccttagaatgttacatagccagtaggttctttattcaaattttaagtatcttaagaatagtagggcagtaacagttacttttgagagttttctggtcaagcttttaccaggcattctctagccttggtacaaaaaaaaaaacctgctggtngcgcaaatncctagg

SEQ ID NO: 241 - DNA, 430 bp, Homo sapiens
  misc_feature (1)...(430): n = A,T,C or G
ctcaaatgtataaaccattaagtagtcaaatggctacagtgaaaaacagtattttatagtaggtatagataattggcacagataagctcagaaaagaatgatcagttcttgctggagtaattctagggaaatggctttcatggagaaaaggaaaagaggaagtgtagtatcagtctatgttgtctattgctaatgtggaatggtgttttctgcttctacgccttactgattccagttnttatatttagaaaacaaattaagtgaagcttctggaggtagggctgaaaatggtgaaagaagtgacttggaagaggacaacgagaggganggaacggaaaatggagccattgatgctgtgtcctgtnatgaaaatntttncacnggananggatttnggatngctacgaagaacggaattcggattccnctt

SEQ ID NO: 242 - DNA, 239 bp, Homo sapiens
  misc_feature (1)...(239): n = A,T,C or G
gtcgcagtagttccagtagcagctccagtacaagtggcagcagcagcagagatagtagcagtagcactagtagtagtagtgagagtagaagnnggagtaggggccggggacataatagagatagaaagcacagaaggagcgtggatnggnagagaagggatnctncaggaatggaaagatgttcatnatanaaatngtggtgtananaanatcaaaaaaactggggntttgnattaacg

SEQ ID NO: 243 - DNA, 282 bp, Homo sapiens
  misc_feature (1)...(282): n = A,T,C or G
aaatgactgtgctgcccctttcacatcaaagaactactgacaacgaaggccgcgcctgcctttcccatctgtctatctatctggctggcagggaaggaaagaacttgcatgttggtgaaggaagaagtggggtggaagaagtggggtgggacgacagtgaaatctagagtaaaaccaagctggcccaaggtgtcctgcaggctgtaatgcagtttaatcagagtgccattttttttttgtncaaatgattttaattattggaatgcncaattgntttaatat

SEQ ID NO: 244 - DNA, 712 bp, Homo sapiens
  misc_feature (1)...(712): n = A,T,C or G
aaaggtccaaaagcctgccaacccctgggaattctacattgggacccagttgatggaaagactaaagccatctatgcagcacatgtttatgaagttctattctgcccacttattccagaatggcagtgtattagtaggagagctctacagctatggaacattattaaatgccattaacctctataaaaatacccctgaaaaagtgatgcctcaaggtcttgtcatctcttttgctatgagaatgctttacatgattgagcaagtgcatgactgtgaaatcattcatggagacattaaaccagacaatttcatacttggaaacggatttttggaacaggatgatgaagatgatttatctgctggcttggcactgattgacctgggtcagagtatagatatgaaactttttccaaaaggaactatattcacagcaaagtgtgaaacatctggttttcagtgtgttgagatgctcagcaacaaaccatggaactaccagatcgattactttggggttgctgcaacagtatattgcatgctctttggcacttacatgaaagtgaaaaatgaaggaaggagaagtgtaaaccttgaangtctttttagaangntttcctcatttgggatattgtgggaatgaatttttttcatgttattgttgaatattccaaaatggcatnttctncctctttggaattgntaangnaaaaacncg

SEQ ID NO: 245 - DNA, 689 bp, Homo sapiens
  misc_feature (1)...(689): n = A,T,C or G
catttttaaggcttatctaattaactgtgtttggaactgctataaatacatcaacaaccgaaacgtgccggagattgctgtgtaccctgcctttgaagcacctcctcagtacgttttgccaacctatgaaatggccgtgaaaatgcctgaaaaagaaccaccacctccttacttacctgcctgaagaaattctgcctttgacaataaatcctataccagctttttgtttgtttatgttacagaatgctgcaattcagggctcttcaaacttgtttgatataaaatatgttgtcttttgtttaagcatttattttcaaacactaaggagctttttgacatctgttaaacgtctttttgtttttttgttaagtcttttacattttaatagtttttgaagacaatctaggttaagcaagagcaaagtgccattgtttgcctttaattggggggtgggaagggaaagagggtacttgcccatagntgcctttntaactgcactttctgnatataatcgtttgcattttggtacttgntnccntgagtactttcaggaagactgacttaaatatttcggggtggagtaangagntngggnattaagaacttgaaactttttcatttgccanaaggcaaaaaaaaaaaatttngaccattngggggnnttggacctgtgggaaaaaaanaatggg

SEQ ID NO: 246 - DNA, 701 bp, Homo sapiens
  misc_feature (1)...(701): n = A,T,C or G
ctgaaagaagcccaagtacagtatcctctccagacatttgcaattggcatggaagacagccccgatttactggctgctagaaaggtggcagatcatattggaagtgaacattatgaagtcctttttaactctgaggaaggcattcaggctctggatgaagtcatattttccttggaaacttatgacattacaacagttcgtgcttcagtaggtatgtatttaatttccaagtatattcggaagaacacagatagcgtggtgatcttctctggagaaggatcagatgaacttacgcagggttacatatattttcacaaggctccttctcctgaaaaagccgaggaggagagtgagaggcttctgagggaactctatttgtttgatgttctccgcgcagatcgaactactgctgcccatggtcttgaactgagagtcccatttctagatcatcgattttcttcctattacttgtctctgccaccagaaatgagaattncaaagaatgggatggaaaacatcttctganagagacgtttgangattccaatctgatcccaaagagattctctgggnaccaaaagaanccttcagtgatggaataacttcagttaagaattcctgggttaagattttacaggaatacgttnaacatcaggttgatgatgcaatgatggcaaatgcagcccanaaatttcccttcn

SEQ ID NO: 247 - DNA, 577 bp, Homo sapiens
  misc_feature (1)...(577): n = A,T,C or G
aaatatcacaagtaggtcttaagtgtcatctggcatcttctttctgtagccaggtaactcttagatcttattcatcagcctgctgaacanttcctttttcagagacatagataccatccaaaaatttcctgatatccttgtttttaactgttgtggcttgctgaatcaaagccgctgaatttgaaacaagctcaatgtcatttccttcaaggattaattcatctttctgggcttgagatactgaacaagcaacacctggtctcatccgaaccctgcggatatatttttcacccaagaaatttcggatttcaacaagagacccattctcctggataacaacgttgatggggaagtgagcatacacagacctcatcttgtaacggaagcccagtgtaacacccttgatcatgttctgtacatgactacaaatagtccgaacggagccagttcctttctgttccccaccatttgtcacccggacctcttttttttctttcnagaangctgantctncattgatgngantgaagccctcccagggntnctctggggccttnacnataactgngcgtccctt

SEQ ID NO: 248 - DNA, 167 bp, Homo sapiens
aaagtaagtcgtttccttttatttgaacacctaggggccattttagagttataattagcccaatttctatatcattttgtctcagggaatagaagcgtgagggagggagagagttgggggaatggctggttggtagagtggtcagaatacacacaacatttataaat

SEQ ID NO: 249 - DNA, 333 bp, Homo sapiens
  misc_feature (1)...(333): n = A,T,C or G
gtctactgcgagaatgaagactattctcagcaatcagactgtcgacattccagaaaatgtcgacattactctgaagggacgcacagttatcgtgaagggccccagaggaaccctgcggagggacttcaatcacatcaatgtagaactcagccttcttggaaagaaaaaaaagaggctccgggttgacaaatggtggggtaacagaaaggaactggctaccgttcggactatttgtagtcatgtacagaacatgatcaagggtgttacactgggcttccgntacaagatgaggnctgtgtatgctcacttccccatcaacgttggtntccagga

SEQ ID NO: 250 - DNA, 364 bp, Homo sapiens
  misc_feature (1)...(364): n = A,T,C or G
ccacaaaaaagcatgcaaagtcattgttacaacagggatctacagaactatttcaccaccagatatgacctagttttatatttctgggaggaaatgaattcatatctagaagtctggagtgagcaaacaagagcaagaaacaaaaagaagccaaaagcagaaggctccaatatgaacaagataaatctatcttcaaagacatattagaagttgggaaaataattcatgtgaactagacaaagtgtgttaagagtgataagtaaaatgcacgtggagacaagtgcatccccagatctcagggacctcccccctgnctntcnaccttgggggaantgagaagacaaggantgggncttgttccttg

SEQ ID NO: 251 - DNA, 248 bp, Homo sapiens
  misc_feature (1)...(248): n = A,T,C or G
gccagcgcgaaggaagtgctggagtcgtgtgttttggctgcgcgtgatcctgcgtgggtcgggaggtgtttctgtgaaaagcctaangattanactgtnagaaaagaaaatagaagccatgtttcgaagacctgtattacaggtacttcgtcagtttgtnagacatgantccgaancaactnccagtntngtcttngaaagatccctgaatcgngtgcncttcttntgncnagtgggtcaggaccctg

SEQ ID NO: 252 - DNA, 538 bp, Homo sapiens
  misc_feature (1)...(538): n = A,T,C or G
aaacttcagctcagtttcttaaccaagaaccacgtcaaccctccagggttgtggtttgtatttttgcctttaagcattatctcctttccaccaagaagcctacttaggtttaacacatgaaagcagtgtctaaaaattagatcggtcctaaattggaatgggatgtcttccttgcatgtcccataccagggaatttttttaacacacagtgtagagcctttgccagagatgttgaaagggagattaaaggcttgagggatgaatttgatcatcattcttaaagtcccttccaatcctgtgattctctgattccctgagctcggttattattggacatgcctagnccattaccangacctnccngcntatggtngtttccctgggataacggaganctatnccncatgccnttggngnctccatcntatcaangaagttgntttntganttttttccatctaaancctcntangtttggtttgagaaaaagatggngaagtccttttcatgaanttcgnagggcaaaaaaaattntttt

SEQ ID NO: 253 - DNA, 332 bp, Homo sapiens
  misc_feature (1)...(332): n = A,T,C or G
cctgacttctgctggcatcaagaggtgggagggccctccgaccacttccaggggaacctgccatgccaggaacctgtcctaaggaaccttccttcctgcttgagttcccagatggctggaaggggtccagcctcgttggaagaggaacagcactggggagtctttgtggattctgaggccctgcccaatgagactctagggtccagtggatgccacatgcccagcttggccctttccttccagatcctgggtactgaaagccttagggaanctggtctnngaggggaagcgggcctaanggattgtttnatancaaaaccnacccattcaga

SEQ ID NO: 254 - DNA, 343 bp, Homo sapiens
  misc_feature (1)...(343): n = A,T,C or G
ctgcaggcagtcccggctgagtttgaatgcatccaccctgagaagcagcagaaaaagaaaagctacaagaactctggaactatccgtgtcaagatttgtcgggtagaaacagagtactcctttctggactatgtgatgggaggctgtcagatcaacttcactgtgggcgtggacttcactggctccaatggagacccctcctcacctgactccctacactacctgagtccaacaggggtcaatgagtacctgatggcactgtggagtgtgggcagcgtggttcaggactatgacttcanacaagctgttccctgcattttggatttgggggccnnggtncccc

SEQ ID NO: 255 - DNA, 404 bp, Homo sapiens
  misc_feature (1)...(404): n = A,T,C or G
aaaactgcaagcaccatgcggttcatacaatcttgttattactgttaatttatcaactaatacaaactcaaaaatgcatccggccagcagcgccagcaatttcaaatgggaacttaaaaatacacttttattttggtatttttgtcagtgcaacttaaatccttttactgacctgcagaaaaaaaaagtnataataaagaaaaacacccatatcttccctataactactatacaactgaagaattgaaggggggggacaccaccaagaactcttcctactatctcaaaagcagggaaagaaacgcaatgcattggtttaaagaacccccttggaaaanttgcaaaatacttggccatgngtggggttttgggtncattcttgnacctagnaagttagngttaag

SEQ ID NO: 256 - DNA, 339 bp, Homo sapiens
  misc_feature (1)...(339): n = A,T,C or G
ccagtggtcggagcggcagggttccacaaacttctccacgaggtccacaaacaggtctctgacatctttattgtgggtcagcttggcggccacgttcaccagcccccgggacaggttcttgaagttggcttccatctcagagaagacgcccagctttccccggagagcagtgcacaccaggctcttgtgcaggtccagaaggtccttgtcagccactagcaccttgagctccttcaagtcctggagaaattccttgtctaagtccatgtccatgtcatccatctgtgagtcgacggctccaaaggtccanntttggatcatgagctcaacngcanaaag

SEQ ID NO: 257 - DNA, 553 bp, Homo sapiens
  misc_feature (1)...(553): n = A,T,C or G
aagagagaagattattttggaatcacaaatcttgttgaacatccagcccagctcaatcctccagttgacaatgacacaccagttactctgggagtatatcttaccaagaaggaacagaaaaaacttcggagacaaacaaggagggaagcacagaaggaactacaagaaaaagtcaggctgggcctgatgcctcctccagaacccaaagtgagaatttctaatttgatgcgagtattaggaacagaagctgttcaagaccccacgaaggtagaagcccacgtcagagctcagatggcaaaaagacagaaagcgcatgaagaagccaaccgcctgcccgaaaactcncagccgnacnagangaaanggccaagaaaatttaaaaaggtttaaagaaaaacntttccccaggggggtncccatttcttgtttnttaanagttccgaaattttgaagcaancccagcccaaaaagttcaaanaattggaancccattgctngggcaacttntccctgacaagggggnggggggtacntgccccagggatgtncaccg

SEQ ID NO: 258 - DNA, 445 bp, Homo sapiens
  misc_feature (1)...(445): n = A,T,C or G
aaaaaatgcactgagtttgggttaaaaaccaaccaccaaaatggatttcaacacagctctaaagccaagggcgtggccggctctcccaacacagcgactcctggaggccaggtgcccatgggcctacatcccctctcagcactgaacagtgagttgatttttctttttacaataaaaaaagctgagtaatattgcataggagtaccagaaactgcctcattggaaacaaaaactatttacattaaataaaaagcctggccgcaggctgcgtctgccacatttacagcacggtgcgatgcacaccgtgaccaaaccacggaagcagcttctggcacttacacccacgaactgcccnggncnggccgntcaaaangcnaaatttccacncnctggccgggcngttnttngtgggatccaacctcggtcccaagcttgggcgtaatta

SEQ ID NO: 259 - DNA, 348 bp, Homo sapiens
  misc_feature (1)...(348): n = A,T,C or G
aaacccgccggactttctgtaagaagtgtggcaagcaccaaccccataaagtgacacagtacaagaagggcaaggattctctgtacgcccagggaaagcggcgttatgacaggaagcagagtggctatggtgggcaaactaagccgattttccggaaaaaggctaaaactacaaagaagattgtgctaaggcttgagtgcgttgagcccaactgcagatctaagagaatgctggctattaaaagatgcaagcattttgaactgggaggagataagaagagaaagggccaagtgatccagttctaantgtnatcttttnttattgaagacnatnaaatcttganttttt

SEQ ID NO: 260 - DNA, 379 bp, Homo sapiens
  misc_feature (1)...(379): n = A,T,C or G
ctgcaagccattcgaataattcaagagagaaatggtgtattacctgactgcttaaccgatggctctgatgtggtcagtgaccttgaacacgaagagatgaaaatcctgagggaagttcttagaaaatcaaaagaggaatatgaccaggaagaagaaaggaagaggaaaaaacagttatcagaggctaaaacagaagagcccacagtgcattccagtgaagctgcaataatgaataattcccaaggggatggtgaacattttgcacacccaccctcagaagttaaaatgcattttgctaatcagtcaatagaacctttgggaaagaaaatggaaangnctgaaactnctcccttccccaaaaaggacctcggncgngacc

SEQ ID NO: 261 - DNA, 334 bp, Homo sapiens
  misc_feature (1)...(334): n = A,T,C or G
ccttgagagcccagcccttgcatcagtgtagcctggacgtgagacatggagtcaaaagagattattttggagctttaagattcaatggctgccctgctgggttttgaacttgcacgtggcctgtagcctctttgttttgcctgatttctctcttttggaatgggagtgtttagccaatgcctgtgcccctattgtatcttggaagtaactaacttgtttttttattttatagactcatgggcagaagggacttgccttgtctcanatgagactttggactgtgggacttttgagttnacactganatgagntaaaatttttggggacttgttga

SEQ ID NO: 262 - DNA, 376 bp, Homo sapiens
  misc_feature (1)...(376): n = A,T,C or G
catttttaaggcttatctaattaactgtgtttggaactgctataaatacatcaacaaccgaaacgtgccggagattgctgtgtaccctgcctttgaagcacctnctcagtacgttttgccaacctatgaaatggccgtgaaaatgcctgaaaaagaaccaccacctccttacttacctgcctgaanaaatgctncctttgacaataaatcctataccanctttntgtttgngtatgctnacagaatgctgcaattcacgngctcttnaaacttgngtgatataaaatttggtagcntttcgcntaagcattncattttcgaancantaangagggnctttgccntttgnttancnagctttgntttnctcttttgg

SEQ ID NO: 263 - DNA, 333 bp, Homo sapiens
  misc_feature (1)...(333): n = A,T,C or G
ctgctatttccaccaatagagagaccaggaagaatcctttactgcagtctccatcacgaaatgagaacaaaacgtccatgttctcataagtcaggggcttattaggatcctttttcttccagtttgccaagacacagtctgcataaaccaaaataggaggcagttccagtttcttggagagttggcagtaaggaacagcaatatttcttggcaagaccttacggacatctccattgacctttgccccacacatatgccatggtgatgcatcccagaactagacgtgcaangccgctgtgacttgtggtcttgngagatgatcnatgntggagc

SEQ ID NO: 264 - DNA, 347 bp, Homo sapiens
  misc_feature (1)...(347): n = A,T,C or G
gaaagagtaaaaccttttatgacaggggctgcagaacaaatcaagcacatccttgctaatttcaaaaactaccagttctttattggtgaaaacatgaatccagatggcatggttgctctattggactaccgtgaggatggtgtgaccccatatatgattttctttaaggatggtttagaaatggaaaaatgttaacaaatgtggcaattattttggatctatcacntgtcatcataactggcttctgcttgtcatccacacaacaccangacttaanacaaatgggactgatgtcatcttgagctcttcatttattttnnctgtgatttatttggaatgggangccc

SEQ ID NO: 265 - DNA, 411 bp, Homo sapiens
  misc_feature (1)...(411): n = A,T,C or G
tcttgttgaaatccgaaatttcttgggtgaaaaatatatccgcagggttcggatgagaccaggtgttgcttgttcagtatctcaagcccagaaagatgaattaatccttgaaggaaatgacattgagcttgtttcaaattcagcggctttgattcagcaagccacaacagttaaaaacaaggatatcaggaaatttttggatggtatctatgtctctgaaaaaggaactgttcagcaggctgatgaataagatctaagagttacctggctacagaaagaagatgccagatgacacttaagacctacttgtgatatttacctcggcccgcgaccacccttaanggcnaaattccacancactggcnggccntttccttggnnggatnccaanctcgggtnccaagnctttgg

SEQ ID NO: 266 - DNA, 291 bp, Homo sapiens
ctggtgctctgggtctaccctacctgacatccttccagtcttatcctttgtttcctatccaggcccaggcttgtggctgagaacatccactttcagtcccatatacctgcctccaagtgtggtacagagaacttgggcctgctgggggcgcttagccttactctctccaccacctctcccaccaacccccagatgaactgcaggtagacgtttcttccttgcttggagccccagtttttgcatttcattttcattaaaatagaaaggtggtttggttttggttctaaggag

SEQ ID NO: 267 - DNA, 508 bp, Homo sapiens
  misc_feature (1)...(508): n = A,T,C or G
aaaagcaattactgtacttatgtatcgaacttatttgtgtagcaactaattcatctgtgaagccatggtttgctgtggcttcacagtaaattttgacttaagtctaaagcgtgtgttagcatctcaccgtaacttaatgcttcgagtgagaagtttgaggaatgctgctttaggcaaaagagccactggaggaatgagctctgctcttttcacctgctctggactgctctcactttcctcaccgacaggaccacaggcttaagaactggctcagcagtccttctttagggtctagcgcctgcctaccagcttcctctacttctatcccgggacagatgaatgcttttcttaaaaatttttggaacatntgcttgattccttaccaaatgccttaaaaaactggnaagntcagctccgacatggacctcggccgnaaccccnctaaggcgaattccaccctggcggccgttcctaggggaccaactcggtcccacntngcnaatatggc

SEQ ID NO: 268 - DNA, 359 bp, Homo sapiens
  misc_feature (1)...(359): n = A,T,C or G
aaagagatttattaaatcatcttatcacaaagatggaaacatatacaaactagaaacatgcaaccatcatcttccacagtcaagtcacaatgtcaaatatttttcttgcctctgcagatgaaaagttcagatcttatacccaactacttactcaccccgaatatttaagtcagtcttcctgaaagtnctcagggtagcaagtaacaaaatgcaaacgattatataaagaaagtgcagttaaaaaggaaactatgtggcaagtaccctctttcccttcccaccccccaattaaaggcaaacaatggcactttgctcttgcttaacctaattgtcttcnaaaactnttnaaatgntaaaga

SEQ ID NO: 269 - DNA, 220 bp, Homo sapiens
  misc_feature (1)...(220): n = A,T,C or G
ccagcttcgagaaagagttgagaagttaaacatgctcagcattgatcatctcacagaccacaagtcacagcgccttgcacgtctagttctgggatgcatcaccatggcatatgtgtggggcaaaggtcatggagatgtccgtaaggtcttgccaagaaatattgctgttccttactgccaactctncaanaaactngaacngnctcctntntttgtttat

SEQ ID NO: 270 - DNA, 431 bp, Homo sapiens
  misc_feature (1)...(431): n = A,T,C or G
ggcaggtctgcaagccattcgaataattcaagagagaaatggtgtattacctgactgcttaaccgatggctctgatgtggtcagtgaccttgaacacgaagagatgaaaatcctgagggaagttcttagaaaatcaaaagaggagtatgaccaggaagaagaaaggaagaggaaaaaacagttatcagaggctaaaacagaagagcccacagtgcattccagtgaagctgcaataatgaataattcccaaggggatggtgaacattttgcacacccaccctcagaagttaaaatgcattttgctaatcagtcaatagaacctttgggaagaaaagntggaaagggctggaaacttcctcccttncccccaaaaaaggaccttgggccncnaacccccctaaagggccaaattcccancncacttggcgggc

SEQ ID NO: 271 - DNA, 343 bp, Homo sapiens
  misc_feature (1)...(343): n = A,T,C or G
ccaaaggaatctgcagcaacttcttaaaatactgttaacatctttgggtttgctgaggcttgtcagtaacttacatcaaatcctcccaaaagaagatctgattagatagatatgactaaacggttttgtagtaataatccaattttacacattaatttgctgttgcaaatctgcccaaagctacaggtaatgaaaaataaagcaagtgtaaaatggatagtctgacacttaaaaatttatacaaagtggaagttaaagtttacatatttgaaaatcacatatacactaaattaccattatctgaatttttncaanacaaattgcaccatgaccanctacaaaa

SEQ ID NO: 272 - DNA, 340 bp, Homo sapiens
  misc_feature (1)...(340): n = A,T,C or G
aaattttgtagccattcttatgatgctcttgatttgttggttacacaaatcaattttattaaaaatccaaagataagtctttaggtatattttgtaccaaattaaattagaagataaaaattgtgctttcatagttgctacaaaggtaaataatggagagatttggtacaaaacaacaaaatatatatatattctcatatatatatatatagctgataaaatnacctgaggagtgtaatgtttatttttttgtgtatatctttgcaatctattttatatatattgacaaaagagactgtgaaatacttagccatgcanaatttgngaccagnnccagagc

SEQ ID NO: 273 - DNA, 627 bp, Homo sapiens
  misc_feature (1)...(627): n = A,T,C or G
aaagcttccccagcaacgtcagcaagagttgcaaatcactgctcaacagaacctcttacgaagcaaaaacataaagaaaaataagccgggcagagtggctcacgcctgtaatcccagcactttggaaggcagaggcgggcggatcacctgaggttaggagttcaagaccagcctgggcaacatggtgaaaccccatctctactaaaaatacaaaaattagccgggtatggtggcaagtgcctgtaatatcagctcatgggaggctgaagcacgagaatcacttgaatcagggaggcagangttgcaacgaaccaagatcgtgccactgtctctagcctangtgacggagtgagcctccgtttcaaaaaaaaaanggaaaacccncnaattttggggncttggggaatagttaaaaattaaaangncccctcnttgggnttcntacnttttttnccttttgaaccttttgaaaccttcccaaaaatnannagtggtttaatntnttgtcccattctttntttaacngtttaagaaaaaanccttaaattgaagggncttnggccggnaaacccccnttaagggcgaaattcccancncccttggngggncggttnctnntgggttccc

SEQ ID NO: 274 - DNA, 169 bp, Homo sapiens
  misc_feature (1)...(169): n = A,T,C or G
aaatgactgtgctgcccctttcacatcaaagaactactgacaacgaaggccgcgcctgcctttcccatctgtctatctatctggctggcagggaaggaaagaacttgcatgttggtgaaggaagaagtggggtggaagaagtggggtgggncgtctgngntntcttgag

SEQ ID NO: 275 - DNA, 430 bp, Homo sapiens
  misc_feature (1)...(430): n = A,T,C or G
aatgtgggctccaagcagatgcagcagatccgcatgtcccttcgcgggaaggttgtggtgctgatgggcaagaacaccatgatgcgcaaggccatccgagggcacctggaaaacaacccagctctggagaaactgctgcctcatatccgggggaatgtgggctttgtgttcaccaaggaggacctcactgagatcagggacatgtngctggccaaggacttcgagaaagcatacaagactgtcatcaagaaggacgagcaggagcatgagttttacaagtaaccctncccttccctccacccacaccacttcagggggcttgggntttttttcgcacccccagcaccctntatcccaaaaccncanttccctttttttttttnccccaaggattggggttcttcantaattngantaanaaccgaaatcc

SEQ ID NO: 276 - DNA, 290 bp, Homo sapiens
  misc_feature (1)...(290): n = A,T,C or G
ggcatcacgaaccatcctgcttcaagggagcctgcgggtctgactgcagcttcagctatgacctggagttcccgggcttctctgcggggcaccagtctgtatgctccattttagataataaaaattggcatattctggggtgggcaggatacggggttcacctgcagatgaacagggcaggaaaagcttgatggggtgtcgggggaatctggttggccttaaagggaatttggggncctgttcctgaatttggtaggcaagcatgcatgtaaggcttgaagtgggtttgg

SEQ ID NO: 277 - DNA, 542 bp, Homo sapiens
  misc_feature (1)...(542): n = A,T,C or G
ccaacaaacgtatggtggagtatgaagaggcccaggcatatgcagatgacaacagcttattgttcatggagacttcagccaagacagctatgaacgtgaatgatctcttcctggcaatagctaagaagttgccaaagagtgaaccccagaatctgggaggtgcagcaggccgaagccggggtgtggatctccatgaacagtcccagcagaacaagagccagtgttgtagcaactgagggggtggctagcagcaaacaagtatggagctagcacaagagctaagaaataacctccatccctacccctcagcacacagcccctacggtaaccagcacactgagccctggcttccaaaggcttgccttcctgacancttcntcatggcacttttttaacncttnancaaccaaacaccaaggcnagacctcgggcccgnaacccccncttaanggcgaaattcccagcncacttgggnggcccgtttncttannggggatcccnaacttcggtncccaanctttgggngtnaatcattggncata

SEQ ID NO: 278 - DNA, 394 bp, Homo sapiens
  misc_feature (1)...(394): n = A,T,C or G
aaaacagacatttaacatacacaagttatagtagcagtatgggcttctcctcccattggcaattaaatgcttttattttcttctgaaaagatgatgtggaccaacaggtatcagacttgccaacaaggtcggtagactcttcccagcatacatctgagcatgtcaaaatctctccttcctataggaaatttagctgagttttcttcatccccaatttctctcttttcttgtgttgatttagtattctgaactccattctcagctgggaaagctacagatccttttagtgcaagataaggttttatagccagattcagtngcagaccatgatttaagaaatctgnttnggaccctgngtcttttgnaacnttntttgtcctcttcgtgcttgaaa

SEQ ID NO: 279 - DNA, 493 bp, Homo sapiens
  misc_feature (1)...(493): n = A,T,C or G
aaagaacctgttcattttccttttttgttaaaagtgctctaagaactaaaagggccgttccttactggaataaaattaactacacatgccatacatttctgggtcaatgttgctggttaaattccctcagaattagcaattcatagaaaattaattgttaagttatcgcactttcatgccaaaagtacaatttagagttcacaatacaaggctctgtggtataaagtgcctatgagcagcttcccatcatacactgaggctacagaacttccttggagaacagacccattgttggcataaactgtagtcactgtaggcttctcagatagaatgttctggatgccgganaacctctgaccnaaggaagattgttcnggtcatacacnaanactttttggacctgcccggccggncgntcaaaagggcnaattccacacattgcggccgtnctatggatccaactcggnccaanttgncgtaactggcatactgt

SEQ ID NO: 280 - DNA, 270 bp, Homo sapiens
aaaacaaaattagtggtaaaatagaaaaaggaaatgtttagtacagaaagtaccagccacagtaccctcataactccatctccttccccaggcatcactctttccagccacttcaatcctaaagcagtgagaccctcattttaacacacagagcctccctgcctaccctccttccctgtaacgtgagctactgtagtccatttattagttcttcggttaagcttcagtagacatttggagcacaattccaaaggtaaatcaatctatagg

SEQ ID NO: 281 - DNA, 150 bp, Homo sapiens
  misc_feature (1)...(150): n = A,T,C or G
ggcaggngtnaggtcttcctctttnctganactggatntgttcaaacagnnaacgcccacagatggnccaaaggtggtggnagtnagggtgtgtgggtgtttttaaggttntctgtgataggacccatccnttcangggnggggggtgtc

SEQ ID NO: 282 - DNA, 300 bp, Homo sapiens
  misc_feature (1)...(300): n = A,T,C or G
ctgtgagcaaaaggagaagtatcagcttctcaagggcctagggtttgttggaagggcaaggcaagggcaaagggggatacagaacaagggggcaagtaccagtgcctgggatggacccatccattcaggcagggggtgtggggtgtcccctgtgcttagaaaccacctagcatcatagctgcaacagcactttattgggatctgagtctacagttcacatagggaggtgaagccgtgggagaagcangggtaaaaaaaaaagggggggggacttcaccccctagggacagacctnggccg

SEQ ID NO: 283 - DNA, 545 bp, Homo sapiens
  misc_feature (1)...(545): n = A,T,C or G
aaacttcagctcagtttcttaaccaagaaccacgtcaaccctccagggttgtggtttgtatttttgcctttaagcattatctcctttccaccaagaagcctacttaggtttaacacatgaaagcagtgtctaaaaattagatcggtcctaaattggaatgggatgtcttccttgcatgtcccataccagggaatttttttaacacacagtgtagagcctttgccagagatgttgaaagggagattaaaggcttgagggatgaatttgatcatcattcttaaagtcccttccaatcctgtgattctctgattccctgagtctcgtttattattggacatgcctagcccatcaccagtgacctgcccgcatattgctggcttcccttggataacggagagcctatcaccacatgcctttgttgtcttccatcatatcaagtgagttgctttctggactttttccatctaaancctgctaggtttggttttgagaaaagatggagaagtttcttttcatgagtttgtanggcaaaaaaaatacttttt

SEQ ID NO: 284 - DNA, 683 bp, Homo sapiens
  misc_feature (1)...(683): n = A,T,C or G
cctcaccaagtcttggctgtttctagctagctctataaacttttttcagcctctgttcattacccagttccaaagctgcttctacattttcagatatttgttatcagcaaaaaccccacctcttggtaccaattttcagccttactctgttttctgatgcatatagcagaatacttgaaactgtataatatataggaatcaaaatgtatttcctacagttacaaaggctgggaagtccaaggtggagagggcacatctggcaaaagtcttcttgctagtggggactctccactttggcagaggtggcacagggaatcagatggtgagggggaagaacatgctagctcaggtctgtttttctcttcttataaagccaccagttcctctccgatgataatccattaattcattaacccattaatcatggaagctcttaatttcctcttaaaggccctacctctcaaaactgtcatattgggggattaagnttcaacatgagttttggaggggctgaacattcaaactatagcataacacacatgctcacccttgaagatggaagactacaagcctctaaagcagnttcaactnncttccngatctgntgaaaaacaagcngananaatgnttttnngagagggaatcccncccctccttggannggaccttngnangcttaaaag

SEQ ID NO: 285 - DNA, 683 bp, Homo sapiens
  misc_feature (1)...(683): n = A,T,C or G
cgagcacgagctgtgaggggattcacttgtgtgcggaactcctcggaaccatggcgtccctttcccttgcacctgttaacatctttaaggcaggagctgatgaagagagagcagagacagctcgtctgacttcttttattggtgccatcgccattggagacttggtaaagagcaccttgggacccaaaggcatggacaaaattcttctaagcagtggacgagatgcctctcttatggtaaccaatgatggtgccactattctaaaaaacattggtgttgacaatccagcagctaaagttttagttgatatgtcaagggttcaagatgatgaagttggtgatggcactacctctgttaccgttttagcagcagaattattaagggaagcagaatctttaattgcaaaaaagattcatccacagaccatcatagcgggttggagagaagccacnaaggctgcaagagaggcgctgttgagttctgcagttgatcatggttcccgatgaaagttaaattccgtcaagattaatgaatattgcgggcacaacattatcctcaaaacttcttactcatcacaaagaccactttacaaagttagctgttnnaacagtctcagactgaaaggntctgcaacctggagcnattcatttatcaaaaactnggaggaagtttgcaatcctntt

SEQ ID NO: 286 - DNA, 415 bp, Homo sapiens
aaaatccctcaaaaactgtttattatacaagtgagttttgagtcacgatgggcttatcggtaggatttctggtagcgagcgcgggcaccagggcctccaaactttttggactcgcagcgacgagggtcagctaccagcagggtccggtcatactggatgaggatgtctttgatctccttcttggaagcctcatccacatatttctggtaataggccaccagggctttggagatggactgacggatagcataaatctgggccacgtgaccaccaccctttacacggacacggatgtctacaccagcaaatcgctccttgccgagaagcagaactggctccagcagcttgtactgtagcgtgcgcggctcaatcatctccaggggccgcccgttcaccttgatgagaccattgccgc

SEQ ID NO: 287 - DNA, 479 bp, Homo sapiens
ctgaggaagctcttcattggagggttgagctttgaaacaactgatgagagcctgaggagccattttgagcaatggggaacgctcacggactgtgtggtaatgagagatccaaacaccaagcgctccaggggctttgggtttgtcacatatgccactgtggaggaggtggatgcagctatgaatgcaaggccacacaaggtggatggaagagttgtggaaccaaagagagctgtctccagagaagattctcaaagaccaggtgcccacttaactgtgaaaaagatatttgttggtggcattaaagaagacactgaagaacatcacctaagagattattttgaacagtatggaaaaattgaagtgattgaaatcatgactgaccgaggcagtggcaagaaaaggggctttgcctttgtaacctttgacgaccatgactccgtggataagattgtcattcagaaataccatactgtgaatgg

SEQ ID NO: 288 - DNA, 538 bp, Homo sapiens
  misc_feature (1)...(538): n = A,T,C or G
nccattgatttaggccactggcttagagtactccttcccctgcatgacactgattacaaatactttcctattcatactttccaattatgagatggactgtgggtactgggagtgatcactaacaccatantaatgtctaatattcacaggcagatctgcttggggaagctagttatgtgaaaggcaaatagagtcatacagtagctcaaaaggcaaccataattctctttggtgcaggtcttgggagcgtgatctagattacactgcaccattcccaagttaatcccctgaaaacttactctcaactggagcaaatgaactttggtcccaaatatccatcttttcagtagcngctaattatgctctgtttccaactgcntttcctttccaattgaattaaantgtggcctcgtttttagtcatttacctcggccgcgaccacnctaagggcgaaattccagcacactggcgggccgntacctagtgggatccccaacctcnggatacccnaggccttgggccgctaaatncaattggg

SEQ ID NO: 289 - DNA, 475 bp, Homo sapiens
ccactccctgaccccatcccacctccccagcagttcccgagggcagggctgaccgcagagctatcctctagtctccagaccacattatcgcttttcttctgttttctccaattgctgggtgtttgtgttgctcctcccacacaccccccagaaggacccccgaaggattatttggatgaacagtactcataaacaggaagcactggctacagttattctgaaaaatcccaaacgcaaaagggaggcaaagctgtctccaccctgcaggatgacaaaggcaatggccgcagagtggcttcggaccccacatgggaaccagatcagatctctctgggcttctgttttccttactgtaaaggctggagtgcagtggcacgatctcggctcactgcaatctctcaaccccaggagggttcaagcgattctcctgcctcagccttcccagaagctggaactacaggcgcccgccaccagg

SEQ ID NO: 290 - DNA, 327 bp, Homo sapiens
  misc_feature (1)...(327): n = A,T,C or G
nctgaggttgtcagtacaatgaaaccaaactggcgggatggaagcagattattctgccatttttccaggtctttgagttgcacgtcaaatctggggctgatcaccccacacttgtttagcctgcctgtgaggttcacaacaattttcccagctctgtggtcatcaatgatttcaaattcgccaatgtaaccatgcttcatcatcacagtgagaaaccggacgatgactttggagcacggcctaataagcacctggcgtttgcctctcttttcggcattgttgatactcttgagagcatctgccaggacattcatgcgcaccattgtg

SEQ ID NO: 291 - DNA, 688 bp, Homo sapiens
  misc_feature (1)...(688): n = A,T,C or G
aaatatcacaagtaggtcttaagtgtcatctggcatcttctttctgtagccaggtaactcttagatcttattcatcagcctgctgaacagttcctttttcagagacatagataccatccaaaaatttcctgatatccttgtttttaactgttgtggcttgctgaatcaaagccgctgaatttgaaacaagctcaatgtcatttccttcaaggattaattcatctttctgggcttgagatactgaacaagcaacacctggtctcatccgaaccctgcggatatatttttcacccaagaaatttcggatttcaacaagagacccattctcctggataacaacgttgatggggaagtgagcatacacagacctcatcttgtaacggaagcccagtgtaacacccttgatcatgttctgtacatgactacaaatagtccgaacggtagccagttcctttctgttaccccaccatttgtcaacccggagcctcttttttttttttccaagaagggctgagtctacatttgatgtgattgaagtccctncnaggggtcctctggggcccttcacgataactgtgcgtcccttcagagtaatgtcgacattttctggaatgtcgacagtctgattgctgagaatagtctttcattctcgcacctgccccgggcggnccnangggcgaaattccaa

SEQ ID NO: 292 - DNA, 213 bp, Homo sapiens
  misc_feature (1)...(213): n = A,T,C or G
aaaaataaaattataaacaaaatacagaaaaatattgacacctgtgataacaaggaaatgactcttaanggcagtttgttgtcctgggggaaaaaatcataagtgttataaagaaatattattgtncaaaggaggaatgtnatatttaaggttcatttacaacgggcatttggcgtcgacagaaaaagtctttctatgtatacattcaacatt

SEQ ID NO: 293 - DNA, 720 bp, Homo sapiens
  misc_feature (1)...(720): n = A,T,C or G
aaagagatttattaaatcatcttatcacaaagatggaaacatatacaaactagaaacatgcaaccatcatcttccacagtcaagtcacaatgtcaaatatttttcttgcctctgcagatgaaaagttcagatcttatacccaactacttactcaccccgaatatttaagtcagtcttcctgaaagtactcagggtagcaagtaacaaaatgcaaacgattatataaagaaagtgcagttaaaagggaaactatgtggcaagtaccctctttcccttcccaccccccaattaaaggcaaacaatggcactttgcccttgcttaacctagattgtcttcaaaaactattaaaatgtaaaagacttaacaaaaaaacaaaaagacgtttaacagatgtcaaaaagctccttagtgtttgaaaataaatgcttaaacaaaagacaacatattttatatcaaacaagtttgaagagccctgaattgcagcattctgtaacataaacaaacaaaaagctggtataggatttattgtcaaaggcagaatttcttcangcaggtaagtaaaggaggtgggggttcttttttcaggcattttcacggccctttcatagggttggcaaaaccgtacttganggaggtngctttcaaagggcnagggggtacccangcnaaattctnccngggcnaccgnttttccggngtngtntggaatgnttaattcc

SEQ ID NO: 294 - DNA, 680 bp, Homo sapiens
  misc_feature (1)...(680): n = A,T,C or G
aaatgaaggcaccaacaagaactactttcagatggtacagaatttcttatttcttgaagactctgtggttgaccacttcttcattagttacctgcagcaagacaccttcctgccaaaggaaaaaaaaagtatctgaagaagtttatcatgtttgtccaaaagaacctaaacaacttcagtggtggtcttaggatcaaagaagactcattggtgtatagagtaagccctgagtatcacattcctgtaaaggcaataaagccgggcaatcaaactgatcatatctaaggaatgaatttcaacagccaacctacaactttctcttcagggtaagacactgaactagaattaccacatttaacccacctatttagtactggatacataccaggcttcataatgcagacaagacacttcactcaagtatgaactactatctgaaaatagattcaaccatttttgccctaccttctttcagtctcatcctgataagcatgtacagttacaaccataaatacaacaaatgtctttaataaaaacccctagttcactcaaaatggttgatncaanaaatgtgaatcacaagggngtaaccatgggnaanctcatggaattatttgaaacttggcaggccttancntttttaccctacccattttttaccttccccaaaccccccccct

SEQ ID NO: 295 - DNA, 666 bp, Homo sapiens
ccaggctggttttgaactcctgacctcgtgatccacccgcctcagcctcccaaagtgctgggattacaggcgtgagccaccgcgcccggcaagaattcaaagttaaaacaggttaccactttcacctattaccatcaggttgcttatttttgttttatgttttttatttgtatgcatgtttactttatgtttcagtttactaccccctaaggcagcaagagagcaggaagataagcaaaatagagatgtttttgacaacttggcactgagagactatcctaagggaataatctgaaatacataaaaacattttattcacaaaattggtcatcacagcattatttacaatactgaaaatctggaaatagcctaaatttctaacaattgaaagaaggttaagtaaattataagactacacaataaaatatattaccagcaatatatctttgtgaaaatctataataaccacacataatacttagtaaaaaagaacataaattacatgataaagaatatgatcagaacaatgcaaaaaattcacacccccaaaaaagacaagatattatatggcaatttcgtggtaaaatattcatgtatttgtgctgcatttctaatttttccgtaactgacacatcagttttataattaggaaaaaaatacctttta

SEQ ID NO: 296 - DNA, 691 bp, Homo sapiens
  misc_feature (1)...(691): n = A,T,C or G
aaaaaatgaaatgggaagattgtcaggaaattaggatagctactctagtataatttagaaaaactaagcaagagattctccagttgctagtgagtaagcactctgatttgagaaatgtgtggggacaatggagaaaagttttcagaaaactgctatgtagatttctgaatgtgttgtattttgctgaggaattcggtaacaactgaaagggaaaagtgcttcagccatcttttgaaaacaagttaaaattctggaacttgtatctgtaatacatcctaactcttgtaaaagaaaataatttatcatagctggtgtcctttcattgaaagttgtaatactgtctctaaggagggaggaaaagattattatataattttataactggcaacatttgagttagtattgactttgtctaaaagaggnttgacttcnactgggataaaaatgtcagtgaattttgttaaagtagtaaaaatgcangtgacttagtcggaacataaaattatttgctaataagataatattgcctcctaccaaataaaccgggatttttagnaatatctganggattngttgangggcggagttnnacngtatttggcctagaatttggnaaangtcacttgnatgtcaatatggcngnncaatgttgaanggnttcntanaaacgacttttttctgnccnccccnc

SEQ ID NO: 297 - DNA, 699 bp, Homo sapiens
  misc_feature (1)...(699): n = A,T,C or G
gcatttacgcattcctccagtcttaataatcacatgcggacccacagcgccaaaaaaccattcacgtgtatggaatgtggcaaagcttttaagtttcccacgtgtgttaaccttcacatgcggatccacactggagaaaaaccctacaaatgtaaacagtgtgggaaatccttcagttactccaattcgtttcagttacatgaacgaactcacactggagagaaaccctatgaatgtaaggagtgcgggaaagccttcagttcttccagttcctttcgaaatcatgaaagaaggcatgcggatgagagactgtcagcataaggaatgtgggaaaacctaaaggtgtccctgttctctctgaagacatgaaaactcactggggagaaaccctatgaatgtaaaaatgtggaagcaactttgtatctcaggtcttaatgaacacatatgaattcacagtggagaagaccctgcatcagggaatgtggaaatgactttgctgaattctcaagccttaccaaacacatcagaaatctcctggagagaaactgtatgaatgtagaagaatcttgggaatacctttctgaatcccacaaaccttaatgggtgtatgtgaacctcacattggagagaaaaccctgcattttaccctgcccggggcgggcnctccgaaaagggncgaaattcccagnaccncttggg

SEQ ID NO: 298 - DNA, 691 bp, Homo sapiens
  misc_feature (1)...(691): n = A,T,C or G
ggatgtcatcagcattgacaagacgggagagaatttccgtctgatctatgacaccaagggtcgctttgctgtacatcgtattacacctgaggaggccaagtacaagttgtgcaaagtgagaaagatctttgtgggcacaaaaggaatccctcatctggtgactcatgatgcccgcaccatccgctaccccgatcccctcatcaaggtgaatgataccattcagattgatttagagactggcaagattactgatttcatcaagttcgacactggtaacctgtgtatggtgactggaggtgctaacctaggaagaattggtgtgatcaccaacagagagaggcaccctggatcttttgacgtggttcacgtgaaagatgccaatggcaacagctttgccactcgactttccaacatttttgttattggcaagggcaacaaaccatggatttctcttccccgaggaaagggtatccgcctcaccattgctgaagagagagacaaaagactggcggccaaacagagcagtgggtgaaatgggtccctgggtgacatgtcanatctttgtacgnaattaaaaatattgnggcngggattaataacacaaaaaaaaaaaaaaaaancnttccccgggggggncnttttnaaaangggggncaaaatntttnccccnccaccccncnttgggnggggg

SEQ ID NO: 299 - DNA, 391 bp, Homo sapiens
  misc_feature (1)...(391): n = A,T,C or G
aaatctcatttggttaccttgagtcctggaacatgcagtaactgtcatgctatagacatcatctgtatttggctgggaatacaaatgaagattgtggtgtattcaagcagtagggtttttgcttttgtttttgttttagtgccaacaaaacttttttttgtctgactacattaaagataagactgactatatttatacaacagaaactttgtaatagattttttcagctttgtgaaatcgaattttttttcatcagggctggttggatttcctttttaccctgtaatccaagcgttaatagtttgttagaagatgggttattgcatgtcactttttttttttgtaaaanaaaancttccnttttaaaaaaaaaaaaaaaaaaaaaaaaaaa

SEQ ID NO: 300 - DNA, 341 bp, Homo sapiens; identical to SEQ ID NO: 20

SEQ ID NO: 301 - DNA, 687 bp, Homo sapiens
  misc_feature (1)...(687): n = A,T,C or G
nnaaaggtccaaaagcctgccaacccctgggaattctacattgggacccagttgatggaaagactaaagccatctatgcagcacatgtttatgaagttctattctgcccacttattccagaatggcagtgtattagtaggagagctctacagctatggaacattattaaatgccattaacctctataaaaatacccctgaaaaagtgatgcctcaaggtcttgtcatctcttttgctatgagaatgctttacatgattgagcaagtgcatgactgtgaaatcattcatggagacattaaaccagacaatttcatacttggaaacggatttttggaacaggatgatgaagatgatttatctgctggcttggcactgattgacctgggtcagagtatagatatgaaactttttccaaaaggaactatattcacagcaaagtgtgaaacatctggttttcagtgtgttgagatgctcagcaacaaaccatggaactaccagatcgattactttggggttgctgcaacagtatattgcatgctctttggccttacatgaaaagtgaaaaaatgaaggaggagaatgtaancctgaaggtcttttttagaaggcttcctcatttggatatngtggaatgaattttttcatgttatgttgaatattccanaatgncatcatcttccatctttg

SEQ ID NO: 302 - DNA, 691 bp, Homo sapiens
  misc_feature (1)...(691): n = A,T,C or G
ggcgcctctgcgcgcgggaagatggcggaacaggctaccaagtccgtgctgtttgtgtgtctgggtaacatttgtcgatcacccattgcagaagcagttttcaggaaacttgtaaccgatcaaaacatctcagagaattgggtcattgacagcggtgctgtttctgactggaacgtgggccggtccccagacccaagagctgtgagctgcctaagaaatcatggcattcacacagcccataaagcaagacagattaccaaagaagattttgccacatttgattatatactatgtatggatgaaagcaatctgagagatttgaatagaaaaagtaatcaagttaaaacctgcaaagctaaaattgaactacttgggagctatgatccacaaaaacaacttattattgaagatccctattatgggaatgactctgactttgagacggtgtaccagcagtgtgtcangtgctgcagagcgttcttggagaagnccactgaggcaggttcgtgccctgctgngggcagcctgactagaccccccctgagggnctgcatttctcaatcggngtgtaatcacnttccaagggccaaagcccagctcttttgttcaanntgacttactgtttcttaccttaaaaagnaattgtngatggaaatcaantgtgtttggcngggngaaattaataaaaatt

SEQ ID NO: 303 - DNA, 385 bp, Homo sapiens
  misc_feature (1)...(385): n = A,T,C or G
aaatctcatttggttaccttgagtcctggaacatgcagtaactgtcatgctatagacatcatctgtatttggctgggaatacaaatgaagattgtggtgtattcaagcagtagggtttttgcttttgtttttgttttagtgccaacaaaacttttttttgtctgactacattaaagataagactgactatatttatacaacagaaactttgtaatagattttttcagctttgtgaaatcgaattttttttcatcagggctggttggatttcctttttaccctgtaatccaagcgttaatagtttgttagaagatgggttattgcatgtcactttttttttgtaaaataaaaacataccttttnaaaaaaaaaaaaaaaaaaaaaa

SEQ ID NO: 304 - DNA, 632 bp, Homo sapiens
  misc_feature (1)...(632): n = A,T,C or G
ccaagtcaaaattgggcccagcgtctttctttctgtcttatgacagaccagcctccagccttggtgtggtatctacatgtagccctgcgtaccctgcttctttttagcattcaaggcccactcagggcctcaaattagccaatggtgaatatggatataggacttttanagggatgcaggttgagttgtacataacttanaggtgaagtgcaggtccgaaacagggctagactttggagaactgtaaaatggctcactgagcatgacagcatcaggacccctggagtggctttcaaacttaccttcttctgcaggctacttctggaaatccctaggacttaccagctttctgaacactgcgcatcatgggagggtgaagaggaaaaggggctagttaaaatcttgcttctactgtgggccgaactcaggaggagccctaaagctaagcccttgggcttgacagctctacttttcacctctaactaccactgtgccaatgagtgccgagtgccaagatcagacctcgggncgcgaccccctaagggcgaattccagcacacttggcggccgttnntagtggatcccaanctcgggtacccaagctttgggccgtaaaatcaatggggncatta

SEQ ID NO: 305 - DNA, 696 bp, Homo sapiens
  misc_feature (1)...(696): n = A,T,C or G
aaaactgactaggtcaaaaatagttacgcctgcaggttgacctattcagactttgccaaactcctccaagttcaatataaattgacgttttcagagtacaaagtcaattttacggaaacgctgttcctccttttccatggagccaatctgggtaattttttcattaaaattcttcttctgcctgtttgctgcggaactctttgagctgctgtagccgctcgatagtttcagaaatggtgcgttccccgtggaccttattgtctcttgtgcggatattaacagtgccactgattttctctttttcaccaacaactaaaatgaagttatactgtgctaactgtgcatttcgaatctttttattcaatgtacagcctggatccagatcaatgtctgccatgaatttggcatcgtggaattgttgtcgtaccttttgggcatattcatcacaggttggtcccactggaactaccattacctggcgaggggacagccaaaagggccatttgcccccatagttttctgtgaggatagcaatcattctttccactgatcccaagatggntcgatgaacaatcactggccttttcttatcatcnccatcatggcttacataagtnagaataaatctgatgggcaactggganatccanaacctcggggccgcnacccccncttaaggggccnaattncagncnc

SEQ ID NO: 306 - DNA, 430 bp, Homo sapiens
  misc_feature (1)...(430): n = A,T,C or G
ctggaggatgcatttctgaccccatcccagacacgtgaaagcagaagacatgatgcatctataataatgaaagcacaatctaaagagtattatcacaccgtgaacagcttcttcctgacccagagcaaatattaagagaaagacaatatatttacaaacaagatttaataatgctcacaagaatagagtttgcccccaaatggaaaattacacattattttgtttcaaaaagttataaatttagtgcttgaaaaatccagcaggtaagtagaaggactaacagggtctgtttctggaactgtccgccagcaaatgagcatgctctgtcctggaagccatttttctttttcttttttttttttttttttttttttttnaaaaaaaaaatttttttttttttncccnggggggnnaaaaanggggaantttt

SEQ ID NO: 307 - DNA, 693 bp, Homo sapiens
  misc_feature (1)...(693): n = A,T,C or G
ggaaaaaaaattagaggatgaagccaaaactaacacattctaaagaattgcaaggaaagcaactatgtaattctgttgaaaaaggaaagctcaggaaatactctttttatttcttttgattctagctgtctgcgagcctggctgtggtgcacatggaacctgccatgaacccaacaaatgccaatgtcaagaaggttggcatggaagacactgcaataaaaggtacgaagccagcctcatacatgccctgaggccagcaggcgcccagctcaggcagcacacgccttcacttaaaaaggccgaggagcggcgggatccacctgaatccaattacatctggtgaactccgacatctgaaacgttttaagttacaccaagttcatagcctttgttaacctttcatgtgttgaatgttcaaataatgttcattacacttaagaatactggcctgaattttattagcttcattataaatcactgagctgatatttactcttccttttaagttttctaagtacgtctgtagcatgatggnatagattttcttgtttnagtgcnttgggacagatttatattatgtcaattgatcaggttaaaaattttcagngtgtagttggcaggatnttttnccaaaattnccatgcatttatgggggtcttgggggggcngggggaacatnnggnaaaggttnaa

SEQ ID NO: 308 - DNA, 295 bp, Homo sapiens
ctgagtatgtcccagagaaggtgaagaaagcggaaaagaaattagaagagaatccatatgaccttgatgcttggagcattctcattcgagaggcacagaatcaacctatagacaaagcacggaagacttatgaacgccttgttgcccagttccccagttctggcagattctggaaactgtacattgaagcagaggttactattttattttattttttcttatatcagtattgcagcattcactgtagtgatagaaaacaagttaggaacatagccaattaggacaaggaggattt

SEQ ID NO: 309 - DNA, 58 bp, Homo sapiens
  misc_feature (1)...(58): n = A,T,C or G
gcaggtaaaatgttcatgtcnaaaattantnaactataggaatagctctatgagaaca

SEQ ID NO: 310 - DNA, 366 bp, Homo sapiens
  misc_feature (1)...(366): n = A,T,C or G
nctgcaagccattcgaataattcaagagagaaatggtgtattacctgactgcttaaccgatggctctgatgtggtcagtgaccttgaacacgaagagatgaaaatcctgagggaagttcttagaaaatcaaaagaggaatatgaccaggaagaagaaaggaagaggaaaaaacagttatcagaggctaaaacagaagagcccacagtgcattccagtgaagctgcaataatgaataattcccaaggggatggtgaacattttgcacacccaccctcagaagttaaaatgcattttgctaatcagtcaatagaacctttgggaagaaaagtggaaaggtctgaaacttcctccctcccacaaaaagg

SEQ ID NO: 311 - DNA, 635 bp, Homo sapiens
  misc_feature (1)...(635): n = A,T,C or G
nnaaaaactgactaggtcaaaaatagttacgcctgcaggttgacctattcagactttgccaaactcctccaagttcaatataaattgacgttttcagagtacaaagtcaattttacggaaacgctgttcctccttttccatggagccaatctgggtaattttttcattaaaattcttcttctgcctgtttgctgcggaactctttgagctgctgtagccgctcgatagtttcagaaatggtgcgttccccgtggaccttattgtctcttgtgcggatattaacagtgccactgattttctctttttcaccaacaactaaaatgaagttatactgtgctaactgtgcatttcgaatctttttattcaatgtacagcctggatccagatcaatgtctgccatgaatttggcatcgtggaattgttgtcgtaccttttgggcatattcatcacangttggtcccactgggaactaccattacctggcgaggggacagccaaaagggccatttgcccccatagttttctgtgaggatagcaatcattctttccctgatcccaaganggnntcgatgaacnatnactggcccttttcttatnatccccatcntggctttacataaagtaaanantaaatc

SEQ ID NO: 312 - DNA, 446 bp, Homo sapiens
  misc_feature (1)...(446): n = A,T,C or G
aaaaatatataatgttttattgtcaaaaatagacaaactttaatttcctttaacaggaatattaatttaacagccttccataagccatcaccattttgtaagcataacaggcaagagagtcaaagataactgttagtgggaaaaggacaacagttctacatccatgcccaagaagccttgcccagtcagtggtgacaactccaggacagcggcagaaacacagtgaacctttggagcttaacaatagccatgcaaaacaacatagatttatcttggcccaattctataaagattggctttgtagtatctttccaagcatttgaagagtttagtttggtagaacactgctaatttgaccagngacatttttaggtcacttatagtatcagtanccagggatcacccccctggtttttttanggttanccacccccggggatggaaaa

SEQ ID NO: 313 - DNA, 290 bp, Homo sapiens
  misc_feature (1)...(290): n = A,T,C or G
nnctgtgatgggcttctctggctttggttccaccaagaagagttactgaggctttctgtgcttggcctgactttggcctatgctggacctaactttgcgtgtgtgtgtgtgtagtagggggtcatttctttttgggtaatgggaaagttcttaagagtgtcaatggggagggatagagggtgggggctnatggtttccctctacttngggagagggcacagattgcagaggtaatgctgtggnatattgcttntgnctcantgtatcactggagtcacaggaccctgccc

SEQ ID NO: 314 - DNA, 481 bp, Homo sapiens
  misc_feature (1)...(481): n = A,T,C or G
nngttttacaaggacacctacaacaagctgaaaaccaaggatgagccccagcgggaaacgctgaaagccatccactatgcgttgaactgctgtggtttggctgggggcgtggaacagtttatctcagacatctgccccaagaaggacgtactcgaaaccttcaccgtgaagtcctgtcctgatgccatcaaagaggtcttcgacaataaattccacatcatcggcgcagtgggcatcggcattgccgtggtcatgatatttggcatgatcttcantntgatcttgtgctgtgctatccgcaggaaccgcgagatggtctagagtcagcttacatccctgagcaggaaagtttacccatgaagattggtgggattttttgtttgtttgttttgttttgtttgtngtttgntgntggttattttgccactaattttagtanncattctgctttgctagataaaagctgaantgaccnaggtgt

SEQ ID NO: 315 - DNA, 646 bp, Homo sapiens
  misc_feature (1)...(646): n = A,T,C or G
ccttattgaagatgaatggatcaccattgataaatttaccagattcactgatgttcctttagctgcgggatttcagtggtacctttctcaaactcaacttagtaaactaaaaccaggtgactggtctcagcaagacataggtactaatttggttgaagcagataaccaagcagagtggaccgatgttcagaagaagattatcccatggaacagtcgtgtttccgacttagacctggagctcctgtttcaggatcgtgctgccagacttggaaagtcaattagtagactcatcgttgtggcctcgctcatcgacaaaccgaccaatttaggaggactgtgcaggacctgtgaggtatttggggcttcagtgctcgttgttggcagccttcagtgtatcagcgacaaacagtttcagnacctcagtgtctntgcnnaacagnggcttnctctagtggaggtaaaaccacctcanctaattgattatctgcancnnaagaaaacagaagggtataccctcctttggaattggaacaaactgccaaangtttagacctaacccaatattgcnttcctganaaattntntgctcttgncgggaaatgaacntnngggaattgccgcaatgngacccaccagnnngggccct

SEQ ID NO: 316 - DNA, 313 bp, Homo sapiens
  misc_feature (1)...(313): n = A,T,C or G
ctncaagggncctggtttgnatctaagcaaacacccagatggggttctctggtctcagcaaggcttttcctgttgggagtcacagtaaacagaaacccaaaaatctcatcttgggtgttttcagggcttgttttgagttttgctgaatagggagcgcaagacgccctgagcctccctctcactggtggtgataagaggagccgtctggtgtgtcagggtcacgaacccgttacatttcaggacgatcctttttccttcagcagcatttcttactggctgtggctggaatctgccttttatcacagacctgccc

SEQ ID NO: 317 - DNA, 528 bp, Homo sapiens
  misc_feature (1)...(528): n = A,T,C or G
ccacgtccatcggagtgtccttctcggtgggcgacggggtgcctgaggctgagaaggacgcaggggagcccgagaacacctatattctgcggcctgttttccagcagaggttcaggccctctgtggttaaagactgtatccatgctgtgctcaaggaggaactggcaaatgctgaatattctccagaagaaatgcctcagcttacaaaacatttatcagaaaacattaaagataaattaaaagaaatgggatttgaccgatacaaaatggtggtgcaagtagtgattggagaacaaagaggtgaaggagtattcatggcttctcgctgtttctgggatgctgacactgacaactatactcatgatgttttcatgaatgacagtttattctgcgttgtagcagccatttggctgtttctactactgaatgaatctttgaaaagctggtaaaagacatgaccatgaagaaatctcaactttttaatatttgttaaatatcttgacnaaatnaagatnttagntagttccg

SEQ ID NO: 318 - DNA, 224 bp, Homo sapiens
  misc_feature (1)...(224): n = A,T,C or G
nnaaataaattcacacaaagaaagagaaatagaaagcgacggtagtgaccagcaagaggaataataattacattcatcttaatgtgtgtgtgccagttctgtttacattaacattggaaaactccagacctggaatccagaacctcaaatctgtgagtggaatgtcttgagatgggcacgtggaagtcaaagggtttctcttttttttttttcccnttttaaaa

SEQ ID NO: 319 - DNA, 393 bp, Homo sapiens
  misc_feature (1)...(393): n = A,T,C or G
aaataatacagaacaattaaagctaaccaagtgcaacagataaataagcctgccagttatacacataactttataccaaccataattcagccagtcaaaattccaaaaacaatccaaataacttccaacatactagcggtcaaactaccgaataaacttgatgcagaccagtattcccaagttgcaatagtatccaatgactttgctgaaatgcataaaatggacaagcctaggtatctgcgcaaccagcaggtttttttttttgnccaaggntananaatgcctggtaaaagcttgaccanaaaactntcaaaagtanctgttctgccttactnttnttaaaatacttaaaatttgaataaanaacctacnggntatgtaacattntaaggt

SEQ ID NO: 320 - DNA, 369 bp, Homo sapiens
  misc_feature (1)...(369): n = A,T,C or G
naaaaattattatcaaacatgcacatgcttgtacacacacacacacacacacacaaacaggggcatttgtaaaggtgtccctggaatgtaagatttataatgtttaaggcaaggtgaaggcattgccaagtgtgtgtcgctcataagactagtgtatattcactgaaagttaacctgatgatttgttattgtttgaaccatatgctgatttgcttctggtttctgtttagtgtgttctctctgataaggggctgaaagattctgcatcacacatcctctgagacctaccatgtcgcacactttgttaatgacaaacttcactctacactatacagtaccttgttgatatattcagtaaagtcttatttt

SEQ ID NO: 321 - DNA, 618 bp, Homo sapiens
  misc_feature (1)...(618): n = A,T,C or G
aaaagatgtagataaaattttattaataacagaagacttaaaaaacattggaaatacttttttcaaatcccagaactgggagatggctattaaaaaatatgcagaagttttaagatacgtggacagttcaaaggctgttattgagacagcagatagagccaagctgcaacctatagctttaagctgtgtactgaatattggtgcttgtaaactgaagatgtcaaattggcagggagcaattgacagttgtttagaggctcttgaaatagacccatcaaataccaaagcattgtaccgcagagctcaaggatggcaaggattaaaagaatatgatcaagcattggctgatcttaagaaagctcaggggatagcaccagaagataaagctatccangcagaattgctgaaagtcaacaaaagataacgccagaaagataaagagaaggcagtatatgcaaaaatgttgcttagaaaggattcngttgccntatttgggtgnttgattgnattaaattgcnattaanaaaatggtnaaaggggtttttgggcntgggggnaantatngaaanccccnnaaaaggggggnntttcccctttttttggnncnacccccctttc

SEQ ID NO: 322 - DNA, 495 bp, Homo sapiens
  misc_feature (1)...(495): n = A,T,C or G
aaaacaaagatctatcacccaaacatcgacgaaaaggggcaggtctgtctgccagtaattagtgccgaaaactggaagccagcaaccaaaaccgaccaagtaatccagtccctcatagcactggtgaatgacccccagcctgagcacccgcttcgggctgacctagctgaagaatactctaaggaccgtaaaaaattctgtaagaatgctgaagagtttacaaagaaatatggggaaaagcgacctgtggactaaaatctgccacgattggttccagcaagtgtgagcagagaccccgtgcagtgcattcagacaccccgcaaagcaggactctgtggaaattgacacgtgccaccgcctggcgttcgcttgtggagtactaacttttctacagtttttctttattcnaaaaagnggccttnggggtaacccctggtnaaaagnaaaangggattttaaaaaaaaattttttaaaggaaattgtttttccccccg

SEQ ID NO: 323 - DNA, 88 bp, Homo sapiens
aaataatggttgtataaaattgcagcagcaagaaacccaaaggagaatagctctaggggagggaggtggatgagtatgcatggggggg

SEQ ID NO: 324 - DNA, 504 bp, Homo sapiens
aaattacccagtctcaggtatgtctttattagcagcatgagaatggactaataccccaggacaaggccaagatgggagttcatgctcctgaccagagggaaggtggagatgagcagagagcactctcctccaaaagagttgatttctaaatgaaaggaaaaagcaaacacaaataagaaaagatttgcagaaatcaattagaataaaaatgtcaacagacaataacagtgttgcatagcttgaacatttttatattgattaaattgtttttcagtagaatcactgacagaacaggtcagaatgaaaaacattccaaatatacagaaaaaagattactgctcagttaaggtccttttccaaataacttcacacaaatcctttggttgctccaaacagaatgagagctatgagaatggtggcccagcccggccatcagactcccaagcatttggtccccggtctgaggtcacagaatctttgcccctttaccgagactgctctcag

SEQ ID NO: 325 - DNA, 160 bp, Homo sapiens
  misc_feature (1)...(160): n = A,T,C or G
atagggaactcaatgcataactatataatttgaagattatanaanaagggaaatagcaaatggacacaaattacaaatgtgtgntcctgggacgaacacatctttgaaggtcatgagtttgttannttaacatcatatatttgnaatnttgaaacctgga

SEQ ID NO: 326 - DNA, 129 bp, Homo sapiens
cctgccagtctctggacggctacggcgtagggtggcaggcacaatctccgggggcagatgaaggtaatcacggagatactggataccctcattggtaaggtaccagtagaaatgtctccaggcaaactg

SEQ ID NO: 327 - DNA, 364 bp, Homo sapiens
  misc_feature (1)...(364): n = A,T,C or G
ccaggactcggttcagagggtcccgcatgttgaccgtgtggagctgagaggctgagagggagctgctcatggatcggtctgtggggctcgaaaggatgttggcatcgtcctcattagagctcagcagtcgcatcaacttcnaaggctgcacatcntccagggggaagaggctgatagaccaaatttttcattttctttcttgctaggactgtatgcaaancatgaaactannnaatgcgcnaaaatgaatctctcttcctatatattaatactaacctntntctttntttnctttanggtgatctttactttnacagncatcncaaanncccttatancanccttntccantgnatggaccact

SEQ ID NO: 328 - DNA, 601 bp, Homo sapiens
tgttgcctgggctggacgtggttttgtctgctgcgcccgctcttcgcgctctcgtttcattttctgcagcgcgccagcaggatggcccacaagcagatctactactcggacaagtacttcgacgaacactacgagtaccggcatgttatgttacccagagaactttccaaacaagtacctaaaactcatctgatgtctgaagaggagtggaggagacttggtgtccaacagagtctaggctgggttcattacatgattcatgagccagaaccacatattcttctctttagacgacctcttccaaaagatcaacaaaaatgaagtttatctggggatcgtcaaatctttttcaaatttaatgtatatgtgtatataaggtagtattcagtgaatacttgagaaatgtacaaatctttcatccatacctgtgcatgagctgtattcttcacagcaacagagctcagttaaatgcaactgcaagtaggttactgtaagatgtttaagataaaagttcttccagtcagtttttctcttaagtgcctgtttgagtttactgaaacagtttacttttgttcaataaaagttttgtatgttggcattt

SEQ ID NO: 329 - DNA, 415 bp, Homo sapiens
ccacccagtactttgctgacagggacatgttctgtgctggccgagtacctgaggaggatctgaagaggacaatgatggcctgtggaggctcaatccagaccagtgtgaatgctctgtcagcagatgtgctgggtcgatgccaggtgtttgaagagacccagattggaggcgagaggtacaatttttttactggctgccccaaggccaagacatgcaccttcattctccgtggcggcgccgagcagtttatggaggagacagagcggtccctgcatgatgccatcatgatcgtcaggagggccatcaagaatgattcagtggtggctggtggcggggccattgagatggaacttctccaagtacctgcggggattactcaaggactattccaggaaaacaagcagacctcgggccg

SEQ ID NO: 330 - DNA, 337 bp, Homo sapiens
ggaccttctgcggccgatgagaagaagaaggggcccaaagtcaccgtcaaggtgtattttgacctacgaattggagatgaagatgtaggccgggtgatctttggtctcttcggaaagactgttccaaaaacagtggataattttgtggccttagctacaggagagaaaggatttggctacaaaaacagcaaattccatcgtgtaatcaaggacttcatgatccagggcggagacttcaccaggggagatggcacaggaggaaagagcatctacggtgagcgcttccccgatgagaacttcaaactgaagcactacgggcctggctgggtgagcatgg

SEQ ID NO: 331 - DNA, 352 bp, Homo sapiens
  misc_feature (1)...(352): n = A,T,C or G
naaataatccaggcaggagaagagaggagggcacacttggaactcccctccccacaatacgtgattatttacattttagtaattggacaatcccggctcaggaggaggttgcaagaatctgcaaaagttggagggagcgccccaggagaacaaacagcaagccttatttcccctagcccatcccccaaaaaaccatccatcccatcctagtgtctggtggtgtccggtggtgtccatcttccattccttcccaaattatggaagtaaggttcttctcaccagaataagagcacttgggataacagagtagggtcccctcacccaaaaaaaaaaaaaaaaancnttgggggaa

SEQ ID NO: 332 - DNA, 368 bp, Homo sapiens
  misc_feature (1)...(368): n = A,T,C or G
nngtgacattggcccctagaccctctctatagccatgagactccttgtggcctcaagaaatttagacgcccacgacagcactacacagcatctccaggtgatgcccaaggcacagggctgcagaaaataaacctccagattccaccaacacgggtccattcttcctggtgatggcagaggggcttcttttagctagtttgatcttttgggagtctgtctttccttagccgtctgagtgagctgtgtatgaacaagtcccaggagttccaagagtctagagtggtttttgcagcatgggttgagtgtacaaagcctactgtgcgtgagatcctctccttccgtttctgaaatctcttactcaggtaagg

SEQ ID NO: 333 - DNA, 132 bp, Homo sapiens
  misc_feature (1)...(132): n = A,T,C or G
ggggcgggaagtggcaggaaatggcgaaagcctcaggaatgtttccaccagggaaggntgggcaaacngggccaggaggaatgcccagacaagaactctggttagggggaggggaatnacacancanaacca

SEQ ID NO: 334 - DNA, 418 bp, Homo sapiens
  misc_feature (1)...(418): n = A,T,C or G
ctggatgaggaggagaggatgagaatggcagaaggaggagttactagtgaagattatcgcacgtttttacagcagccttctggaaatatggatgacagtggttttttctctattcaggttataagcaatgccttnaaagtttggggtttagaactaatcctgttcaacagtccagagtatcagaggctcaggatcgatcctataaatgaaggatcatttatatgcaattataaggaacactggtttacagttagaaaattaggaaaacagcggtttaacttgaattctctcttgacgggtccagaattaatatcagatacatatcttgcacttttcttggctcaattacaacaggaaggctattctatatntgtcgttaagggngatctgccnnattgcnaanctgaccaactcctgc

SEQ ID NO: 335 - DNA, 644 bp, Homo sapiens
  misc_feature (1)...(644): n = A,T,C or G
aaaatatcttctttctccaaagagtccattgcgcatttcttagagtagagatggggacacattccaggcaaggtcacaatggcattttgttgccctcaatgctgattttcactgcgtgtgcagatctgctttttttccttatatctgtgaactttctcatctgtttatccagtcgactgatacccttcttggaggtcgcctgaaactaagagtaagggaaaaattaaagagcaaactactgaaatacgtaagtctagttatgtctttcatcttcttataactgagttagcaaccagaagagcttctagctctggaataaccagaatgtgtgttgatgacctcaagaacaacaaagcaagtatagatggtgttagaaacgcgtattaaactctctcagtgaagaataattctgtngtctgtgctttatttttaattttgctgcagnccacggaggtctcctagatgggagaaagagggggggaaactgagacnatgatcctcccaattccctcatggtccattacgtnttaactgcatgccgtttcccttttcgaagacccaaatgnggaaccctagccgntttgacanngcaccttncnaaaccngnggcttggncataaaaaaaaagaaatgaacccttaaaa

SEQ ID NO: 336 - DNA, 343 bp, Homo sapiens
  misc_feature (1)...(343): n = A,T,C or G
nncctgggggggatggtatatggccctttccccaccaggcgctaaggggaacacccccttccccaggtcttttatttntttaanttatttttgcacaaatgactcttttatatttaattcgatttcattgcctcccttcttaaagncaacaggctcagtttacaaacctgtgagctactgttngctgctnccctccttcccantgaaaggtacaaagnaataagcatcatgcatcctccccttacccctccaacacccctctgcctctggctnangttnctcaaancacanatcctctcttaccccntccccangtttnaaacncatatcctcatttcaaacg

SEQ ID NO: 337 - DNA, 377 bp, Homo sapiens
  misc_feature (1)...(377): n = A,T,C or G
ctgcagctcccacctccagcctgcagtatcctgctgacaaacttcctgtgtaccttaccagcaggacaccagattggcacagtcagtcccttgttccaaaaattggaaaatgaccagattgaaagtttaaggcagcgctttggagggggccaggtgagaaagctaaaggctgtgccctcgctccacaacagccacagcatcactnacctantttncctaaacagatctnacncatnactntttcnatnttttggacctgccgcttcctcacttacagtntttctttcctgtcttaactagaagagaccttcnacttaaaggtaacctgggtaccatatgaaaaggctcaatgaaattnnaccntgacggannatatt

SEQ ID NO: 338 - DNA, 493 bp, Homo sapiens
  misc_feature (1)...(493): n = A,T,C or G
nnccaagaggagcaattttcgtgccatcagcaaaaagctgaatttgatcccacgtgtggacggcgagtatgatctgaaagtgccccgagacatggcttacgtcttcagtggtgcttatgtgcccctgagctgccgaatcattgagcaggtgctagagcggcgaagctggcagggccttgatgaggtggtacggctgctcaactgcagtgactttgcattcacagatatgactaaggaagacaaggcttccagtgagtccctgcgcctcatcttggtggtgttcttgggtggttgtacattctctgagatctcagccctccggttcctgggcagagagaaaggctacaggttcattttcctgacgacagcagtcacaaacagcgctcgccttatggaggccatgagtgaggtgaaagcctgatgtttttcccggccagtgttgacatcttccctgaacacattcctcagtgagatgcaggcatctggcacccag

SEQ ID NO: 339 - DNA, 489 bp, Homo sapiens
ctggatgaagttgtgtcagagaaccagaggcttaaagtccctagtccaaagcgaagagttgtctgtgtgatgatagtattggcatttataatactgaactatggacctatgagcatgttggaacaggattccaggagaatgaaccctagtgtgagccctgcaaatcaaaggaggcaccttctaggattttctgctaaagaggcacaggacacatcagatggtattatccagaaaaacagctacagatatgatcattctgtttcaaatgacaaagccctgatggtgctaactgaagaaccattgctttacattcctccacctccttgtcagcccctaattaacacaacagagtctctcaggttaaatcatgaacttcgaggatgggttcatagacatgaagtagaaaggaccaagtcaagaagaatgacaaataatcaacagaaaacccgtattcttcagggtgctctggaacagggctcaaattctcag

SEQ ID NO: 340 - DNA, 286 bp, Homo sapiens
  misc_feature (1)...(286): n = A,T,C or G
ctgaatggtgctgacggtggagctcacagagctcctgcattctcaaggtttggatacattctgggaagggtgaactggtgtaagagtcacataatacgtggaggggtgtaataatcaaaaaaacatagcaaaacaccttctgtgcctgagccagggttgagggagccgagaagaaagtccacagctctgccacacgggccagcagtgctcatgtctgctggctgatcctccccaaagcctctcctgccacctttttttttttttttnancnaaacaaaagggcaaa

SEQ ID NO: 341 - DNA, 640 bp, Homo sapiens
  misc_feature (1)...(640): n = A,T,C or G
aattgtcggtgttaacaaaatggattccactgagccaccctacagccagaagagatatgaggaaattgttaaggaagtcagcacttacattaagaaaattggctacaaccccgacacagtagcatttgtgccaatttctggttggaatggtgacaacatgctggagccaagtgctaacatgccttggttcaagggatggaaagtcacccgtaaggatggcaatgccagtggaaccacgctgcttgaggctctggactgcatcctaccaccaactcgtccaactgacaagcccttgcgcctgcctctccaggatgtctacaaaattggtggtattggtactgttcctgttggccgagtggagactggtgttctcaaacccggtatggtggtcacctttgctccagtcaacgttacaacggaagtaaaatctgtcgaaatgcaccatgaagctttgagtgaagctcttcctggggacaatgtgggcttcaatgtcaagaatgtgtctgtcaaggatgttcgtcgtggcaacgttgctggtgacagcaaaaatgacccaccaatggaagcagacctgcccgggcggccgctcgaagggcgaattccagcacactggcggcccgtactagtggatccgagctcn

SEQ ID NO: 342 - DNA, 651 bp, Homo sapiens
  misc_feature (1)...(651): n = A,T,C or G
ccaattaaaatatatagcaataacagtatcattaatactggaacaataaatgatacaaattaatcctaaagcatacagaaaaaaacatcatatgaaagttactttctangctcagttattctaaacttggntaaaatatgcaacttgaattctaatgcatccttctcatttgaactaaaggattattctgcggacacaaatttgttcctaaaatttcaatcaaatggggtctctgcatatcccacaactgcttcctaatgacttcctaccctccagttacacataatcataatgtctaaacaacacantttaggattccaaaattataaggccattcaagtttcttcaatctctaacatgcaggatctctatcaaaatgggagattaatttttgatatgaatatcagatgaaagataatgaaatttgtataagatcagcactaatacatataataagatcaacatttttacagaattatttctttagatttagaaagaatacacatttcgaacacttgaaagagggctacacatggtaagttatcatctgccagtatcaaaaatgatgtgttgaaaacccctgngggaaatgagttaatgaagtcacacaggacctgccccngggggggcccttcgaaaagggngaaatct

SEQ ID NO: 343 - DNA, 487 bp, Homo sapiens
cctttccatttttatcttgtatttttccactcttttggcagacctgcatgggcaaggacgtaacccttcacgtctcagcaagcaaccccgctatgctactgtaccagaagtttggattcaagactgaagaatatgtattagatttctatgataaatattacccattggagagtacagagtgtaaacacgcattctttctgaggctccggcgctgatgcgaatacagctcacagagaaacgcatgtgctattggagaacaggtctttgtggagatctaaaggcagtgattgatttcacagggagctctaatctctgtgattacatggtccttcaaactcccaaccaaagtgagaaaagcggcaggcagtgaaatgagcagtgagcagccctttagcaaaatcgccctccagtccttcctggagatgccttcagccagcatcccagactccacagttatttatgaatgatgtcgtgattctccctccac

SEQ ID NO: 344 - DNA, 395 bp, Homo sapiens
gcctgaagtcacatcggctgcatcattttcattcaaaagccctgcagcttccagttttggatcacctggattttcaggacttccagcttccttggcaacaggtcctgtcagagctccagtggccccagcctttggaggtggcagttctgtggctggttttggtagtccgggctcacattctcacactgctttttctaagccatccagtgacacttttggaaatagcagcatatccacttctctgtcagcctcaagcagcatcattgcaacagataatgtgttattcacacccagagataaactaacagtagaagaactggaacaatttcaatccaagaaatttactctgggaaaaattccattaaagcctccacctctggaacttctaaatgttt

SEQ ID NO: 345 - DNA, 571 bp, Homo sapiens
  misc_feature (1)...(571): n = A,T,C or G
aaagatgttttcttgaattatttagaacatggtaagcctggtattttttaatcaaacaaaatatttatgaaatgggttttctcttaattctggattcatcatggctttctaataccaattgtaatatttacaatattcaccaaaacttagaattttgcanangctggaattctgccagtgtttctttgctaagccttgcatgcaaaatttgaaattttaacattggcacccaaaacctacatggaatgtatgtctggagtatttcaaactttacattgaaacataatttccttggaaaacaaaccataagcctgaggaggtttttatcaactggaatgctttatattaggtttgtttttcactgtacattcctcattttacattcatttaacctgccaattatttaatttttttattgtaaagtagtttttagcattngcttttatttttttactttgatgcctttcaaaattgggcatgtctttacctgcccgggcngncgctcgaaagggcgaattnccagcacactngggggccgntactagngggatcccaagctcgggncccaaac

SEQ ID NO: 346 - DNA, 494 bp, Homo sapiens
  misc_feature (1)...(494): n = A,T,C or G
ggcggccnggcaggnccattnacagtatggtatttctgaatgacaatcttatccacggagtcatggtcgtcaaaggttacaaaggcaaagccccttttcttgccactgcctcggtcagtcatgatttcaatcacttcaatttttccatactgttcaaaataatctcttaggtgatgttcttcagtgtcttctttaatgccaccaacaaatatctttttcacagttaagtgggcacctggtctttgagaatcttctctggagacagctctctttggttccacaactcttccatccaccttgtgtggccttgcattcatagctgcatccacctcctccacagtggcatatgtgacaaacccaaagcccctggagcgcttggtgtttggatctctcattaccacacagtccgtgagcgttccccattgctcaaaatggctcctcaggctctcatcagttgtttcaaagctcaaccctccaatgaagagcttcctcag

SEQ ID NO: 347 - DNA, 501 bp, Homo sapiens
aaatatcacaagtaggtcttaagtgtcatctggcatcttctttctgtagccaggtaactcttagatcttattcatcagcctgctgaacagttcctttttcagagacatagataccatccaaaaatttcctgatatccttgtttttaactgttgtggcttgctgaatcaaagccgctgaatttgaaacaagctcaatgtcatttccttcaaggattaattcatctttctgggcttgagatactgaacaagcaacacctggtctcatccgaaccctgcggatatatttttcacccaagaaatttcggatttcaacaagagacccattctcctggataacaacgttgatggggaagtgagcatacacagacctcatcttgtaacggaagcccagtgtaacacccttgatcatgttctgtacatgactacaaatagtccgaacggtagccagttcctttctgttaccccaccatttgtcaacccggagcctcttttttttctttc

SEQ ID NO: 348 - DNA, 304 bp, Homo sapiens
ctgtagccgagagtcaccaggtccccacagggtgtcagagagggtgtggagctgcttagcactcagcatcactgtctggttaaacacagtccagatgacaccctgggcacagggcggtgtagtcagagacccctcatattggaggtagcggctgaagtcagagggcaggagtgtagatatgtccagtcctgggacctgagtctctgagccttcctcagcgatttcttccaagcgagacagcaactgctcataggcactgttttcttccgggccctcctccagaaaggcggccaacacggccagg

SEQ ID NO: 349 - DNA, 511 bp, Homo sapiens
  misc_feature (1)...(511): n = A,T,C or G
gctatgcatctgaacaagtgggtctctcccttgagcaccaggagtgggtgccagccggccccgaggattcccagcaccccacctatggtcttgccagcataggcttgctagttccttcttggtcagaggtagctgcagaggggggaggccaagggtttggtctaagctgtgccctgccacctggcaggaggcccactcactgcccaagtcatggcaacaggctggagcagcccaggagatgggcctaaaatgttctggatcccttgggtcctagtgttatgttccagtctgcccacctgtgctcaggatgcagccctgggatccagcacccatggaagcttctgctgggatggtgtcacctatgggttttgaaccagtgtggtatggtccttgggagctctgctctgagcttgccacactgctgagagcacccacttgtcctgaccagggtctcagtnggtcctgacccccaatgtgggcaggggcttgggcangagggngggggtctgct

SEQ ID NO: 350 - DNA, 536 bp, Homo sapiens
ctgtaacaagtgaggggtgcaactgaaggtacagcatttgcctgcaggccaagcggtctctggttcaaatccatgtgcctcccaccccccttcagttttctacttattgaacaaaagccttttcacctcgggtctattatactggaatcttcctgcaaggagagaagagaggatagacagcatagagctttgccaggaagcctctctagtttcttgtaggccccagtgaacttctccaggcgactctgtcccctcattaacccttatcctcagagccttgaaatgggcccaattgtcccatagaactgatgtttatggtttttcttgaataaacctagaaattgaccctctcagtcttgaaacccaaggagaaatttacatttatgtcatctgaattcctttctcaggaaaccagccagcaatcctcccagacggtatcaagaaactgaaatttaccagatccccacatctggaaagtgagaagccagacccctcacccatcatgattccccaggtgaccacctgctgcctgttgg

SEQ ID NO: 351 - DNA, 364 bp, Homo sapiens
  misc_feature (1)...(364): n = A,T,C or G
ncctttatacacatatgtctacacatagggatttggatgatctcgggatcccacatcctcgctgtcccctgtccccccgcaacatcccccaccaatacctttctgaagttttctagtccctcctttttgtttgtgctccttaaagcccagccccatgcctgactttggttcccagtgagcattgtacatttgtggatattaaatctttggcaangncatttacctgggctggaatagggctcttggctgattctttttcctaaacacccacccaatgggagaggctgatactcaacatgcaaaccttgtgtnttatttctccaggcgaagggatgttggaagacnttctgnaaggggnggggtg

SEQ ID NO: 352 - DNA, 396 bp, Homo sapiens
aaatatcacaagtaggtcttaagtgtcatctggcatcttctttctgtagccaggtaactcttagatcttattcatcagcctgctgaacagttcctttttcagagacatagataccatccaaaaatttcctgatatccttgtttttaactgttgtggcttgctgaatcaaagccgctgaatttgaaacaagctcaatgtcatttccttcaaggattaattcatctttctgggcttgagatactgaacaagcaacacctggtctcatccgaaccctgcggatgtatttttcacccaagaaatttcggatttcaacaagagacccattctcctggataacaacgttgatggggaagtgagcatacacagacctcatcttgtaacggaagcccagtgtaa

SEQ ID NO: 353 - DNA, 230 bp, Homo sapiens
aaacttgatccaacctctttgcatcttacaaagttaaacagctaaaagaagtaaaataagaaggcaatgcttgtggaatgtacagtgcatattggcggcgcacgcctcattacgattcgcctgcttgcttctcctgttcaatcgtttctttggaaggcagtggatttttctcttgcgtctctgtcttcttcagtttcgacttatcgaatttctcgatctcagccatatcg

SEQ ID NO: 354 - DNA, 289 bp, Homo sapiens
  misc_feature (1)...(289): n = A,T,C or G
naaagcaaatacaaaacagaacagaggattcaaaccgcaagtatgggagatttaggccctgcagaggcagaccattccttagtatctcacaaagcagagtaatactggaggcagagtagggggtggttggagagcagttagtacaaagaggcagaacagtgtctggtttacttggcatacacagaatctgcactgccggttccagaactgcaaagttggtgaactacaggagatgtgggtatttagactccaaagtttatactgagctcagtgcctgggaccgctccag

SEQ ID NO: 355 - DNA, 647 bp, Homo sapiens
  misc_feature (1)...(647): n = A,T,C or G
naaacatggataaaagtattacatgggtccactgttaaaacagacaacatgtggcaaattaattctggtatcatgttttccaacaaagcttagaaaataaaggtgttgaggtggctttggactaagtttaatagtcatctcctctgctgacaacttctttacatgttggacgcaacaggatggtatgttcaaattgcgctgtatatgatcctttaatgtcacataatggtggatatggatctacaatgcccaagtcacacagattcttcagagccatcaagtatttactttctcccaagcgatccagccatctgcggcagaaggcaagggttccaaagttttcattgatgacatttaacaagtgttttgttcttggaagccttattggcacatgtccaacatcaaaatttttcatgtaatgtgaacattccatatcatcatgaacaacaccttttcctgtactaccaaatgtttcaattgcatatacttctccttcctccattcttgttgcctcccctcctttcacaatcggcactgnttttccagcatgtattctatattgcccaattgaatgtccatttagattacgggattnggnttcncttgatatgtcnttcccatctatttcaacttcntaggactccntt

SEQ ID NO: 356 - DNA, 331 bp, Homo sapiens
gccgccgcttgtgctgcagccatgtctctagtgatccctgaaaagttccagcatattttgcgagtactcaacaccaacatcgatgggcggcggaaaatagcctttgccatcactgccattaagggtgtgggccgaagatatgctcatgtggtgttgaggaaagcagacattgacctcaccaagagggcgggagaactcactgaggatgaggtggaacgtgtgatcaccattatgcagaatccacgccagtacaagatcccagactggttcttgaacagacagaaggatgtaaaggatggaaaatacagccaggtcctagccaatggtctgg

SEQ ID NO: 357 - DNA, 336 bp, Homo sapiens
ggcaggtccaacatgaggaacagcaagctgaaggacatccggaacgcctggaagcacagccggatgttctttggcaaaaacaaggtgatgatggtggccttgggtcggagcccatctgatgaatacaaagacaacctgcaccaggtcagcaaaaggttgaggggtgaggtgggtctcctgttcaccaaccgcacaaaggaggaggtgaatgagtggttcacgaaatacacagaaatggactacgcccgagctggtaacaaagcagctttcactgtgagcctggatccagggcccctggagcagttcccccactccatggagccacagctcaggcag

SEQ ID NO: 358 - DNA, 668 bp, Homo sapiens
  misc_feature (1)...(668): n = A,T,C or G
aaaggtccaaaagcctgccaacccctgggaattctacattgggacccagttgatggaaagactaaagccatctatgcagcacatgtttatgaagttctattctgcccacttattccagaatggcagtgtattagtaggagagctctacagctatggaacattattaaatgccattaacctctataaaaatacccctgaaaaagtgatgcctcaaggtcttgtcatctcttttgctatgagaatgctttacatgattgagcaagtgcatgactgtgaaatcattcatggagacattaaaccagacaatttcatacttggaaacggatttttggaacaggatgatgaagatgatttatctgctggcttggcactgattgacctgggtcagagtatagatatgaaactttttccaaaaggaactatattcacagcaaagtgtgaaacatctggttttcagtgtgttgagatgctcagcaacaaaccatggaactaccagatcgattactttgggggttgctgcaacagtatattgcatgctctttggcacttacatgaaagtgaaaaaatgaagganggagaatgtaagcctgaaggtcttttttagaaaggcttcctcattttgggatatggnggaatgaattttttcatgntatggntggaatatttct

SEQ ID NO: 359 - DNA, 648 bp, Homo sapiens
  misc_feature (1)...(648): n = A,T,C or G
caggccgtaggaggaagatggcggtggagtcgcgcgttacccaggaggaaattaagaaggagccagagaaaccgatcgaccgcgagaagacatgcccactgttgctacgggtcttcaccaccaataacggccgccaccaccgaatggacgagttctcccggggaaatgtaccgtccagcgagttgcagatctacacttggatggatgcaactttgaaagaactgacaagcttagtaaaagaagtctacccagaagctagaaagaagggcactcacttcaattttgcaatcgtttttacagatgttaaaagacctggctatcgagttaaggagattggcagcaccatgtctggcagaaaggggactgatgattccatgaccctgcagtcgcagaagttccagataggagattacttggacatagcaattacccctccaaatcgggcaccacctccttcagggcgcatgagaccatattaaattctatttactatttgttgaatttatttttccgtcagttatgtaaaataaacatactcttcttcctcccctgattattgccattaagcctttacctgcccnggcggnccgctcgaaagggcgaattccagcacacttggccggccgttactagtggatccgagctcnt

SEQ ID NO: 360 - DNA, 670 bp, Homo sapiens
  misc_feature (1)...(670): n = A,T,C or G
ctgacatttattattttggtttcattttcctttttgcgtctttatgtttctttcgacaatccatacgcaggttggttgttctggcctcccaagagttcctgctcatattacttcctactcctctccagaataagtcagaaccttgaagtcgttcatcattcttagagaaaaagaaaaatctagtggtctctttctcaagtaatgatgcttctctgaaaagaaagggacaaaggagagagaaaaataggtattggttggtttaatttcaatatttaagaagaaatatttacattcaaaacataaatacactatttcttaaatatatcttttttcatttccccctagaatccaggtgagcgagactcttaaatatatctgctttgtattttgtgcattttgccctgagttaaaacaaccctccctctaacattcttctatctgaagctttgataatgaagacttgtttaagtagaacctctatctttcctgtgnttggttgctgatactctcactcccaccattgctaccccattttgccantgcctcccatggggtangcacccangncaaacctgcaacatcctgntttcccngaccangnggacttccacttggcanggngccnccccttcccccttttttcttatgcccccaaaaccttntctttccc

SEQ ID NO: 361 - DNA, 566 bp, Homo sapiens
  misc_feature (1)...(566): n = A,T,C or G
gcatttacgcattcctccagtcttaataatcacatgcggacccacagcgccaaaaaaccattcacgtgtatggaatgtggcaaagcttttaagtttcccacgtgtgttaaccttcacatgcggatccacactggagaaaaaccctacaaatgtaaacagtgtgggaaatccttcagttactccaattcgtttcagttacatgaacgaactcacactggagagaaaccctatgaatgtaaggagtgcgggaaagccttcagttcttccagttcctttcgaaatcatgaaagaaggcatgcggatgagagactgtcagcataaggaatgtgggaaaacctaaaggtgtccctgttctctctgaagacatgaaaactcactggggagaaaccctatgaatgtaaaaatgtggaagcaactttgtatctcaggtcttaatgaacacatatgaattcacagtggagaagaccctgcatnagggaatgtggaaatgacttttgctgaattctcaagccttaccaaacacatcaggaaatctcacttgggagagaaaacccgtatgaatgtag

SEQ ID NO: 362 - DNA, 612 bp, Homo sapiens
  misc_feature (1)...(612): n = A,T,C or G
aaaatactttatttagccaaatggtttcttgaatcttagctacagagaaatttttacattaaagaacatcatgattatcacaacaacttacttagcacttgcgtgtactaagtgctgcactaagacattgtagtttccagtgtcttgaaccaacctgggaaaaatatcagtggtgagggttcagtgtttgtatatggaggatggtgcaaactgaattattcccataaagctgcttggtaattccagagaaagcacacagccaccttctcattagaaggagggtagggataggtgttatggtgaaaaactgagatgctgctggatcccaggccagaggacctaaagaaatactctctccattaggagcccaccctgtggaggaactcgagcctactccagatggggactgggtaggaacatcagtgccatttttcttcagatgaatattgtagacccagaaggaagcaccttgtaagcaggaaaaataaatttgtgctgaaataatggatgtaaaatacttctccctgtccactattgtcaaaacacctgcccngggcggncgctcaagggcgaaattccagcccactgggcgggcgttacttnngggatccc

SEQ ID NO: 363 - DNA, 607 bp, Homo sapiens
  misc_feature (1)...(607): n = A,T,C or G
cctgggcttcagtataagctcctatctcagtctggccccgttcatgccccagtcttcacaatgtctgtagatgtggatggcacaacatatgaagcctcaggaccatccaagaaaacagcaaaacttnacgtagcggtgaaggtattgcaggcaatgggatatccaacaggctttgatgcagatattgaatgtatgagttccgatgaaaaatcagataatgaaagtaaaaatgaaacagtgtcttcaaactcaagcaataatactggaaattctacaactgaaacctccagtaccttagaggtaagaactcagggccctatcctcacagcaagtggcaaaaaccctgtaatggagctcaatgaaaaaagaagaggtctcaagtatgaactcatctcagagactggtggaagccatgacaagcgctttgtaatggaggtagaagtagatggacagaaattcagaggcngcaggtccaaataagaaagtggcaaangcgagtgcagctttagctgccttggagaaactgnnntctggaccccaatgcnggcnaatnatnagaaaaaagaagattattccttcnnggcaaaagggcgttngggnaatacca

SEQ ID NO: 364 - DNA, 399 bp, Homo sapiens
ccagctccccaatcaatctccagtactcattgaacttgagctccgagtcctgattcacatccaagctcttcatcttctcatcaagagagcccacatccttgagcagatggggcaactgctgggtaaccagctctttgaactcgttgacgctgaggctatccttccggccctcctgccttgcaaaggtgaagaaggtggtgaccacggtctcaatggactcctctagctctgtcagtggttctgctgccattaggaccctgaggccaaagctgatgtcctcaaggggctagctgacctttgtcagggctgacccggcaaggagatggggtagagtgagctggagcctcagggctgaggtttataagcagcggggaaggaggagagagctgcttccaagcc

SEQ ID NO: 365 - DNA, 529 bp, Homo sapiens
ccacgtccatcggagtgtccttctcggtgggcgacggggtgcctgaggctgagaagaacgcaggggagcccgagaacacctatattctgcggcctgttttccagcagaggttcaggccctctgtggttaaagactgtatccatgctgtgctcaaggaggaactggcaaatgctgaatattctccagaagaaatgcctcagcttacaaaacatttatcagaaaacattaaagataaattaaaagaaatgggatttgaccgatacaaaatggtggtgcaagtagtgattggagaacaaagaggtgaaggagtattcatggcttctcgctgtttctgggatgctgacactgacaactatactcatgatgttttcatgaatgacagtttattctgcgttgtagcagcatttggctgtttctactactgaatgaatctttgaaaagctggtaaaagacatgaccatgaagaaatctgaactttttaatattgttaaatatcttgacaaaataaagatgttagtagttcgaaaaa

SEQ ID NO: 366 - DNA, 453 bp, Homo sapiens
  misc_feature (1)...(453): n = A,T,C or G
aaagacaaaaaaattcttttatgtacaatatcttgtctagagtctagcaaatatagnacctttcattgcaggatttctgcttaatataacaagcaaaaacaaacaactgaaaaaatataaaccaaagcaaaccaaaccccccgctcaactacaaatgtcaatattgaatgaagcattaaaagacaaacataaagtaacttcagcttttatctagcaatgcagaatgaatactaaaattagtggcaaaaaaacaaacaacaaacaacaaacaaaacaaaacaaacaaacaacaaaatcccaccaatcttcatgggtaaactttcctgctcagggatgtaagctgactctagaccatctcgcggttcctgcggatagcacagcacacgatcatactgaagatnangccanatntcatgaccaccgcnatgncgatncccactnccccggatgatg

SEQ ID NO: 367 - DNA, 502 bp, Homo sapiens
ccatccgcaacgacgaggagctcaacaaactgctaggccgggtgaccattgctcagggcggcgtccttcctaacatccaggccgtgcttctgcctaagaagaccgagagtcaccacaaggccaagggcaagtgatttgacaggtatctgagctcccggaaacgctatcaaacccaaaggctcttttcagagcccccctaccgtttcaaaggaagagctaacctcactgcttgtaggtagaaggaaaaaaggcactaaggttgcaaaagcttctcatttcagagagatgccaggatcctaactgcctgccaaacttaccaattctaaggaataagtggatggatggcattactgattcctacattactgattgattctgcatccgcaaattgttttattaaaaacattctacatcatgtgtggggagataaggaggataaaatgaagagaaagaatattattgaggggaagttcttctgaatacaaaatgtgtttaatttttt

SEQ ID NO: 368 - DNA, 695 bp, Homo sapiens
  misc_feature (1)...(695): n = A,T,C or G
naggagagtcagaaacaaacttatagtgatgcgttggaaggttaatcgaaaccatccttacccctatttaatgtagtttaccttgatttttatctgatattaacaataccatatagcttgctttttattagcatttcctgatattcctttgtccatatttctacttataacctgttgctattaatggttttagatgtatctcttgttatctgcatctcattgtttattgtattttgaaccaatctacaagtctctgtcttttaataaaagaactttacacatttgtaaaaaagaggttcttggtaagatataaaatggaaaaaggctaagtaatatgtgaatatcatatttttgaaaggtaaaaagtacatttgtatattacatatatggacataacttgtgaaggatgaaagaaagtacagcctctcggtggtgggattatgaatgatttttctccttttgcttgtttgtattttctatattcctaaaattaacacacattattattgctagaataataaaagnttttatnnaaaaaaaacctttgggccgngacccccccttaagggggcnaaatttcccaancaccaccttgggcnggnccggtttccctaaggnggggaatcccccgaagcctttcggggnnaccccaaangncctttgggggcngttaaaanncattgggggnccattta

SEQ ID NO: 369 - DNA, 473 bp, Homo sapiens
cgacaaacaaggtttccccatgaagcagggtgtcttgacccatggccgtgtccgcctgctactgagtaaggggcattcctgttacagaccaaggagaactggagaaagaaagagaaaatcagttcgtggttgcattgtggatgcaaatctgagcgttctcaacttggttattgtaaaaaaaggagagaaggatattcctggactgactgatactacagtgcctcgccgcctgggccccaaaagagctagcagaatccgcaaacttttcaatctctctaaagaagatgatgtccgccagtatgttgtaagaaagcccttaaataaagaaggtaagaaacctaggaccaaagcacccaagattcagcgtcttgttactccacgtgtcctgcagcacaaacggcggcgtattgctctgaagaagcagcgtaccaagaaaaataaagaagaggctgcagaatatgctaaacttttgg

SEQ ID NO: 370 - DNA, 289 bp, Homo sapiens
ggcatcacgaaccatcctgcttcaagggagcctgcgggtctgactgcagcttcagctatgacctggagttcccgggcttctctgcggggcaccagtctgtatgctccattttagataataaaaattggcatattctggggtgggcaggatacggggttcacctgcagatgaacagggcaggaaaagcttgatggggtgtcgggggaatctggttggccttaaagggaatttggggtcctgttcctgaatttggtaggcagcatgcatgtaaggcttgaagtgggtttgg

SEQ ID NO: 371 - DNA, 466 bp, Homo sapiens
  misc_feature (1)...(466): n = A,T,C or G
gggggcaggtcctaagttataatccttcctcctcacagccccntttccccaagggnntttaccnccagngcagntttctagctgtaaacaatgccaccagcatgagtgatagtgtccctgtagggngctcccacttctcaaggaccaaatacaccttancanaggccaaggtttcctgacaaagtgaatgggggcaaacagaaaatgcacaggtgcaaacatggaatagaatggtagttgatgattggtctgaggtgcctanaaactgagttaaatctanctctanccatgaatgaagaaaaccttttcttattttctatttggagcctcttgacaaaaaaaatcttgagaggntcctgaccaanggacctgagggatttcngggggtttntttcccctaanggnaatcggaattggcntgccntaccttaanctaaatnaaaaatancccttttcncataaataa

SEQ ID NO: 372 - DNA, 280 bp, Homo sapiens
  misc_feature (1)...(280): n = A,T,C or G
aaatcaactgatttgtatggaaaatgacacggcaaataaatnanacctatgttaaagcgaaggtcagctaaatatccaaacttaaggatataatgggcaccgataaacagattccacagtcttctttaatagagtatctttcaaacacaactttgctagaaactggtccaaagatcgacagcacgtgggaatgcttaacaggggtggtgatcagggacacgtttcctgggtgccgctttgatgatgttgtccacacgcagaatcacctctgctgcttcag

SEQ ID NO: 373 - DNA, 721 bp, Homo sapiens
  misc_feature (1)...(721): n = A,T,C or G
ccaattaaaatatatagcaataacagtatcattaatactggaacaataaatgatacaaattaatcctaaagcatacagaaaaaaacatcatatgaaagttactttctaggctcagttattctaaacttggctaaaatatgcaacttgaattctaatgcatccttctcatttgaactaaaggattattctgcggacacaaatttgttcctaaaatttcaatcaaatggggtctctgcatatcccacaactgcttcctaatgacttcctaccctccagttacacataatcataatgtctaaacaacacagtttanggattccaaaattattaagggcntttcaagtttcttcaatcttctaacatgccaggatcttcttttcaaaaatggggaaaaataaattttttggatttgaaattttccaaaaggaaaagaataattgnaaaattttggtnttaaagaatcncnccccttaattccctttttaantaangaatccaccanttttttaccnnnaaattaattttctttttnnaattttngaaaaggaaatccccctttttcnaaacnctttgaaaanaaggnctncncatggtaanttttcatttgccnatntcnaaangaggngttgaaaaccctgggaaagnntaagaanccccgggcctgccgggggccntaagggaatccccaccggggcgtctaggnaccatcggccactgggna

SEQ ID NO: 374 - DNA, 178 bp, Homo sapiens
  misc_feature (1)...(178): n = A,T,C or G
cttccaacttattaaaggggggcccggaaaaatttngggggncgccccttccttaagnaatggnccaattgnccttcgggaagaccgggccnccgncnccagnttgntgggaattgggnattattctttgcccaagaaaaatntccgcccttttnaggccggcggncgnggggggggg

SEQ ID NO: 375 - DNA, 649 bp, Homo sapiens
  misc_feature (1)...(649): n = A,T,C or G
gggcaggtccagacaatgaatgagaagcaactcttccatgggacagatgccggctccgtgccacacgtcaatcgaaatggctttaaccgcagctatgccggaaagaatgctgtggcatatggaaagggaacctattttgctgtcaatgccaattattctgccaatgatacgtactccagaccagatgcaaatgggagaaagcatgtgtattatgtgcgagtacttactggaatctatacacatggaaatcattcattaattgtgcctccttcaaagaaccctcaaaatcctactgacctgtatgacactgtcacagataatgtgcaccatccaagtttatttgtggcattttatgactaccaagcatacccagagtaccttattacgtttagaaaataacactttggatccttcccacaaaattattctccatttgacatatctagttgtaaaacaagttttagctttttttttaattcctcttacagattttctaatatccaaggatattctttgcgctgagcagntttttcncttnttttctaatggaaataacttttatttgaagcaaaacttggaaattacctcggcggaacncctangggaaatcaaccctgnggcgtntagggaccactnggncaactgggaa

SEQ ID NO: 376 - DNA, 397 bp, Homo sapiens
  misc_feature (1)...(397): n = A,T,C or G
cctgcgagggccgaagctaagctctcacgtctggccgccttcaggctccgcacacacaggaagcaaaagctaaggcagagttgaaaatgtgtttaaccgcggaagggctgaccccacatgcacacagacccttctacaaactctgggagggttttatgggtttttttgattccagatgtttaaggaaatctctgtcctatcactgaccactgggctaaaagaataggaagaaacggccatacgtgacaaaaaatacagactttacaaccagaaaagtcattaaacaaataactactgcaacaaacagcaagacaaacccgggaganggcgtaggatcatatttccagagttgctacattataatattctaaacacccagtttacctcggccgcaacc

SEQ ID NO: 377 - DNA, 301 bp, Homo sapiens
  misc_feature (1)...(301): n = A,T,C or G
aaacttgatccaacctctttgcntcttacaaantnaaacanctaaaataagtaaaataagaaggcaatgcttgtggaatgtacagtgcatattggcggcgcacgcctcattacnattcgcctgcttgcttctcctgttcaatcgtttctttggaaggcagtggatttttctcttgcgtctctgtcttcttcagtttcgacttatcgaatttctcgatctcagccatatcgggtttgtcagacatggttgcggaggaaaagcgaagcgaggcgcacgagtacgagcgaagtctggtctgcgc

SEQ ID NO: 378 - DNA, 734 bp, Homo sapiens
  misc_feature (1)...(734): n = A,T,C or G
gggcaggtccacagaagttgctgctgacgctctgggtgaagaatggaagggttatgtggtccgaatcagtggtgggaacgacaaacaaggtttccccatgaagcagggtgtcttgacccatggccgtgtccgcctgctactgagtaaggggcattcctgttacagaccaaggagaactggagaaagaaagagaaaatcagttcgtggttgcattgtggatgcaaatctgagcgttctcaacttggttattgtaaaaaaaggagagaaggatattcctggactgactgatactacagtgcctcgccgcctgggccccaaaagagctagcagaatcccaaacttttcaatctttcttaaanaagatgatggtccncccnttntgttgtaanaaaaccccttaaattaaagaaagggaanaaaacctangaccanaanccnccccaagaattcagcgtctttgtttacttcccccttgttccttgccagcacaaaaaccgggngggcgntatttgnctcnttnaaaaaaanccanccgtcccccnggnaaaaaattaacgnaaagaaggcttgccanaaatatngcttaaaacntttttgggaccntcggccnnggaaccacnnnttaagggcgaaanttccaacccnctttgnngggccgttncttaangggaatcccanncttcgngtacnccaactttggcggntaaancttggggcaananctctnttccgcg

SEQ ID NO: 379 - DNA, 441 bp, Homo sapiens
  misc_feature (1)...(441): n = A,T,C or G
aaataatggttgtataaaattgcagcagcaagaaacccaaaggagaatagctctaggggagggaggtggatgagtatgcatgggggagaggctcttttgtgaccaggttgggtctgnagccctccccactgtccataacacctccnacccctacatctttttccatataccaacnccttggagatataatncanaagtgaagtgatcaggctgangattanggcangtgtctggaatatgatcaggagtgggaggggagtgacntacctcacaggcaangcanaactncnccaangctatangtttccttcccncccctnacttnnaatcctcagggcngaccctgactccncctggcttgccccttcccctacccccnttcncccttttttttttccctncccggncngcccttccanagggcnaatnccngcccncttg

SEQ ID NO: 380 - DNA, 594 bp, Homo sapiens
  misc_feature (1)...(594): n = A,T,C or G
gagcggccgngcgggcaggtaaagtaatagctatcagtaatagctgagtgttttttcccctaatattttccttgtgcaattcagacttaagcatcgagtttttaccatcttccactttaagctaagttatgatacctattccattcacaattggtgttctttttaaggtttgcaaatttcagccaattttgtagctaagattgttctgatcagctcaaaaagatttggcttagtgttttcattgcaaattataattgctgtagagccacacacaacttttgaacttttaattataagtgttatggctaaagttatttactgaaaatttcagtaaaatgtgtgaatgtttctttatgtattaacctcatagcagtaaatgactttgctgtggntaaattttctaaggcatcttaatagacttctgttgaaacttcagggtaacattttatagtttgactaaatttaccgngattaaaaatgaatttatgcatagacagaatttacctcggccgcaccacnctaaggcnattccncacactgggcggccgtactagnggatccaactcgnaccaagctggngnaatcatggcatag

SEQ ID NO: 381 - DNA, 627 bp, Homo sapiens
  misc_feature (1)...(627): n = A,T,C or G
gccgaggtaaaatactgtcatttgctcaaagctggctgccaaatgtttggtgatgaaggcagaaatgaatggctcaaaacttgggagaagagcaaaacctgaaggggccctccagaacaatgatgggctttatgatcctgactgcgatgagagcgggctctttaaggccaagcagtgcaacggcacctccatgtgctggtgtgtgaacactgctggggtcagaagaacagacaaggacactgaaataacctgctctgagcgagtgagaacctactggatcatcattgaactaaaacataaagcaagagaaaaaccttatgatagtaaaagtttgcggactgcacttcanaagggagatcacaccgcgttatcaactggatccaaaatttatcacgagtattttgnatganaataatgttatcactattgatctggttcaaaattcttctcaaaaactcanaatgatgtggacatacttgatgtggcttatatttttgaaaaanatgttaaangngaatccttgtttcattctaaaaaaaatgggccctaaagtnaaatgggggaaccacctgggattttggatcctgggncaaacntttaaatttattattgcngggatgaaaaaaa

SEQ ID NO: 382 - DNA, 574 bp, Homo sapiens
  misc_feature (1)...(574): n = A,T,C or G
gtggagggagaatcacgacatcattcataaataactgtggagtctgggatgctggctgaaggcatctccaggaaggactggagggcgattttgctaaagggctgctcactgctcatttcactgcatgccgcttttctcactttggttgggagtttgaaggaccatgtaatcacagagattagagctccctgtgaaatcaatcactgcctttagatctccacaaagacctgttctccaatagcacatgcgtttctctgtgagctgtattcgcatcagcgccggagcctcagaaagaatgcgtgtttacactctgtactctccaatgggtaatatttatcatanaaatctaatcatattcttcatcttgaatccaacttctgtacagtagcatancggggttgcttgctganacntgaagggttacgtccttgcccatgcaggtctccaaaagagtggaaaaatncaagataaaaatggaaaggacctcggcgcnancacnctaagggcgaattccaccacttgnggccgttactagggatccaactcgnaccaaactggcgaatatggcatactg

SEQ ID NO: 383 - DNA, 719 bp, Homo sapiens
  misc_feature (1)...(719): n = A,T,C or G
aaattatttcactgaagctgagattattagtgatacaaagttaaaatttcaatatttaatttctctatatattattaatattaaattgttttttacttataaattcatgttctcatctgatttaatattaaatttgtataggtgggcgtttcttaccattttgcacaagtttttgtttttctgaaatacttaattgtgcaggttgtaaaaaagattagtgcattttcattttaaggatgctttgctccttaaattgttcgacagaaatgactttttagggaaagtagtttttttggagctactaacttgtatttattattgtacatgcataaccaggggtggngagggcactaatcttgtaggaaacacttacttggaggttttattttgaacnttttcctatagggntnacctttacctgcntagaattaacccttaggaaccagtggncattgaaaatctgggggttgaaagggagaaataccagttttttattgaagaaacccnttaaaagttcnaaaataggaaaatcattttctggaagaacaaaaagcccgaagggaattnttggtcaagtggcccaaanaaatgggaaagaaaataanggggngggnantttaacccttggggccaagntntttggaaaaananaggccntnaaaaaacnggggaacctacctnttnattggggaanaaagtttntncttttttttaatcca

SEQ ID NO: 384 - DNA, 514 bp, Homo sapiens
  misc_feature (1)...(514): n = A,T,C or G
tttttttatgacactggatttctttaattaaaaaaaaaatgccaanaaacattatttatacagggttgattgctttcatgttgttattctgtaccctatagtagcctccatgaaaatctggtatttcttgctgcttggaactactttgcagtgattacttggttgcagtccaagtactctcgtttagtctgancctggagatgttctaaacttgcttctcccacctctgagattaggacaggaaaaatgtgaaatttcccaattacaggattatacggcccntcacatcatttgtggaaattggggtgactgnatacngggattgggctaangactgtggncttatttttccncatncnggcaaaaaggcctatccanaaatccanttcctttggaaaggaaaaattggtcctccttgtcccanaagggggttcccaaaaaaaggggaangncccttttaccctttgcnggggggggggggaaccctgaaaggncttttcantccntttgcgta

SEQ ID NO: 385 - DNA, 444 bp, Homo sapiens
  misc_feature (1)...(444): n = A,T,C or G
gccgccgcttgtgctgcagccatgtctctagtgatccctgaaaagttccagcatattttgcgagtactcaacaccaacatcgatgggcggcggaaaatagcctttgccatcactgccattaagggtgtgggccgaagatatgctcatgtggtgttgaggaaagcanacattgacctcaccaagagggcgggagaactcactgaggatgaggtggaacgtgtgatcaccattatgcagaatccacgccagtacaagatcccagactggttcttgaacagacagaaggatgtaaaggatggaaaatcaccaggtcctaccaatggtctggancttgcccgggcggccgttcaaaaggcnaattccaccnacttggngggccgttacttagnggatccnaacttcggnnccaaactttggcnnnaatcattgggcattancttgttt

SEQ ID NO: 386 - DNA, 348 bp, Homo sapiens
  misc_feature (1)...(348): n = A,T,C or G
ccaggatggtctcaatctcgacctcgtgatccgcccaccttggcctcccaaagtgttgggattacaggcgtgactcaccatgcccagccacttagttttttcttattcccacctttctatcccatagaacactcttttttatcttccctgaaccatattgatgagataaatagggctgggggctgggccccgctggtcactcaacagagtatttcccttggccgagatggaagttttgtcccaatagatgagctgctgagtatcaacaaggtgacatttttctgctgcccatttgtgtcctggagacggtggtaccctgaaggcagangccagaccttccccggcggg

SEQ ID NO: 387 - DNA, 139 bp, Homo sapiens
tcgaaatgcagaacgacgccggcgagttcgtggacctgtacgtgccgcggaaatgctccgctagcaatcgcatcatcggtgccaaggaccacgcatccatccagatgaacgtggccgaggttgacaaggtcacaggcag

SEQ ID NO: 388 - DNA, 715 bp, Homo sapiens
  misc_feature (1)...(715): n = A,T,C or G
ggcgatgttacaaattaattttaacggcttacanantcatttnaagaantgtggtgggaaatacaatcanattttggcatttcgacctacaggatggacacactctaacaagttcactagaatancanatgttattccccanaccaaaggaaacatttcaatatatggaattccttacagtgaacacagcanctacctagaaatgaancgctttgtccagtggctgaagccccanaaaatcatacctactgtaaatgtgggcacctnggaaatctangagcacaatggagaaatattttanagagtggaaattggaaactggatattgatgatacctnccaggattcaagataagttaaattcctttggatgtnncttgttacttanttaaaatctattaaaaatgtgaaaatacacttttgtgggggaaaaccctcattgaaaaattgttcaaaatactttatttttctcatttatgttnnaaccaccatnttcctgggggttnaatncctttcanccttcatcnaaggatactgaacttgggtcncccttgggaccttaatttctttgcccctnnccntccttgggcagttnttttcttcttcnncccnttcaaaaaggaaacaaagcgcgattccngacccaacggttaatgatantaaacaaagncttnaaccttttnttttaacnnttttnggttttcctcccggcgggc

SEQ ID NO: 389 - DNA, 573 bp, Homo sapiens
  misc_feature (1)...(573): n = A,T,C or G
acctgttaatataagggatttgtantatcagcttgttgancaatgactntgaatctagttttcagtgatcanaagcagcagttatttgagtgtatgaatggaatgatgatcactgtgctataatgtactgaaaccaccatattacagaaatatttactacatattttccatctgtagtttctcanaagggctatggattantttgaactgtcaaatccttgcatacttctgtgacacccctgcccattttctgtctttaattaaccaangtgttaggtgtgactgtcacaactgttatgttttccagtaaactanaagtatgatatttgataattatatttggatttcccccctaaaggaatggtgaatcctcaaaaatnaaangaaaggccttcattgaaaatnggtttgnataaattgcattgtgacncattttacctgggnagtcccttacctttttaaattttgggttnttccaaanaaccctaaataaattttgnttaaatccaaaaaaaaaaaaaaaaaaaaaanttttaanccccncgncccncccccnngggggnatcccccccc

SEQ ID NO: 390 - DNA, 350 bp, Homo sapiens
  misc_feature (1)...(350): n = A,T,C or G
ctgaggttgtcantacaatgaaaccaaactggcgggatggaagcagattattctgccatttttccaggtctttgagttgcacgtcaaatctggggctgatcaccccacacttgtttagcctgcctgtgaggntcacaacaattttcccagctctgtggtcatcaatgatttcaaattcgccaatgtaaccatgcttcatcatcacagtgagaaaccggacgatgactttggagcacggcctaataagcacctggcgtttgcctctcttttcngcattgttgatactcttgagagcatctgccangacattcatgcgcaccattgtggnggggacctcggccgcgaaccac

SEQ ID NO: 391 - DNA, 550 bp, Homo sapiens
  misc_feature (1)...(550): n = A,T,C or G
actaaacgagaaattgacagcccttgaacggagaatagagtacattgaagctcgggtgacaaaaggtgagacactcacctagaacagtgccgtgctgctgctgggaagttgctttacacaacacaggccacatgggaaaggccccagcagccttcagctccttcctttctccttaaagagcaacagggcttattcttgtttttcttttttcaaaagtgtggcctttgggctctgccatctggggtgtggtgtggtatgtgggaagaagtcanaggaaccgttggaaacgacgttaggcattttaccttttcagcaacattttatacatctacttgtcaatgnatttgagacattcacagccaaaagcctgggactctttgtgaaggtcctcctcacctctatctttctttctctctctctcaaactttccttaaagttntcattgcctttgccttgcttctgtgaacaagatttgnctcctccccncccttttggtgtgaaanggcggggnaannccttggcaaaaacacttcntgcccctggtcatncg

SEQ ID NO: 392 - DNA, 551 bp, Homo sapiens
  misc_feature (1)...(551): n = A,T,C or G
agaggcaacagcattattgagaaaagcccttacagaagagtgtggccgtaggncagctattcacagtagtgaatcatcttgcagcttgccatctattctgaatgacaatagtggaataaaggaagccaaacctgctgtatggctcaacagtgttcctacaagggaacaagaagtttcaagtggctgtggagacaagagcaagaaagaaaatgtggctgcagatatcccaatcacagaaacagaagcctatcagttgctgaagaaggccacccttcaggataatacaaatcaaactgaaaacaggtttcaaaagacagatgcttctgtgtcacacttgtcaggtttgaatattggcagcggtgcattcgagacaaagacagctaacaaaattgcttcggaagctagtttttcatctagtgaaggaagtcctttgtcaaggcatgaaaacaaaaaagaaacccgggatcaatttacctgcccggcggccgctcgaaagggcgaaattcccncaccccttgcggccgtacttagtggatccganctccgtaccn

SEQ ID NO: 393 - DNA, 351 bp, Homo sapiens
  misc_feature (1)...(351): n = A,T,C or G
ccaacttatatgatttttttttgtttttgtcgtgtanctatggcactgtcttatttggaacatttgcaactagggataatacaacatttttaactctcatttgacaacctactactaatcacagaccacangggtantgaccaaatttatgtggnntttgcactccatagatgcttagcccaatctttctatactcttacgattacttgggttaacgcttctgtgaggaccttctggntcttgagataccctaaatatttaagatatttagatatctngaagatagnataggatatacagattgtaccanntangaatataaggagnatgttaaaangaccagatacctgt

SEQ ID NO: 394 - DNA, 224 bp, Homo sapiens
  misc_feature (1)...(224): n = A,T,C or G
aaaatcctgattttggagacttaaaaccaggttaatggctaagaatgggtaacatgactcttgttggattgttattttttgtttgcaatggggaatttataagaagcatcaagtctctttcttaccaaagtcttgtangcggcttatagttcttttggctaacaaatcattttggaaataaagattttttactacaaaaaaaaaaaaaaaaaaaaaaaaaaaaa

SEQ ID NO: 395 - DNA, 386 bp, Homo sapiens
ccacagctaacatcattgcagcacctttactccttcggctgtgatccaatctccagctcactttttgccagcaccaacattggcctttgcagtccccctgactttcttcattctgttcttgcgttcctttcgttgctttcttgaggtctttttcttctcatacaggccatgtcttgcaagtctatgtttgggttcatttttctttgcataatccagggaatcataaatcatgccaaagccagttgtcttgccaccaccaaaatgagttctgaatccaaatacaaagatgacatccggtgtggtcttgtacattttggctagtttttcccgaatttctgccttaggcactgtcgccttcccggggtgaaggacatcaatgaccattt

SEQ ID NO: 396 - DNA, 543 bp, Homo sapiens
  misc_feature (1)...(543): n = A,T,C or G
aaaatactttatttagccaaatggtttcttgaatcttagctacagagaaatttttacattaaagaacatcatgattatcacaacaacttacttagcacttgcgtgtactaagtgctgcactaagacattgtagtttccagtgtcttgaaccaacctgggaaaaatatcagtggtgagggttcagtgtttgtatatggaggatggtgcaaactgaattattcccataaagctgcttggtaattccagagaaagcacacagccaccttctcattagaaggagggtagggataggtgttatggtgaaaaactgagatgctgctggatcccaggccagaggacctaaagaaatactctctccattaggagcccaccctgtggaggaactcgagcctactccatatggggactgggtaggaacatcagtgccatttttcttcagatgaatattgtagacccagaangaagcaccttgtaagcaggaaaaataatttgtgctgaaataatggatgtaaaatactttcttccttgccactattgtcaaaa

SEQ ID NO: 397 - DNA, 234 bp, Homo sapiens
ccagcgacctcccggttcaattcttcagtccggctggtgaaccaggcttcagcatccttccggttctgctcggccatgacctcatattggcttcgcatgtcactcaggatcttggcgagatcggtgcccggagcggaatccacctccacactgacctggcctcccacttggcccctcagcgtactgatttcctcctcatggttcttcttcaggtaggccagctcttccttcagg

SEQ ID NO: 398 - DNA, 545 bp, Homo sapiens
  misc_feature (1)...(545): n = A,T,C or G
ctgccctaccaaccccagggcctccagcagctccagcaagtggtacccgagcaatgccagtatctttggggggtggcccctccacagtcatggataccaagttctccccacgcagcaacaccanacccaaaacccgcttttcttcacgctctggttgcttcgcattctttggcttgatctttctgaactcatcacaatcacagaggatcaaattcatatgctagtcaaaagccttaaaggtgccaatgaagattcggccatcttgcaggatacatctcattctatagtcaatgtgctgcagcatcttgctactcttgccaacagtcatgattgctgttccaccaaatccaatgtccacagttaaaacttgatgcttctgaaacctaggggaagctatagataaaggtatgacgcaggttctcctanaaacaatgcaagctgggcagaagcttcaaaagagcaagatggagcctgggtttttgctttggaatcaaaattcctcgctactncaatatggctttaaccacctcttggggctcagctaa

SEQ ID NO: 399 - DNA, 544 bp, Homo sapiens
  misc_feature (1)...(544): n = A,T,C or G
ctgcaaagtaccacacatagcagaaagacagaaatttatactggggggttggaagatatggctactgagtctgtaattccatttggaggttcaaaaaaccatttttacattgctattatttgtacagaccaangggacctaaattttgaaacagctagacagtgatataaacaaacatttatctctgggggtagaaaattaattataatacaagaatgaaaatgggcaaacagtatggaaggcacccacacctcctagcaccctttggttttctgatggagttctcacttcacacatcagtgcattggattgcagaaaatattgatattttatttcatcaaaagtgccatttggtatgccactattgaaagcttatcgctgctttttctccttcagcaaagnagaagtcaatgaagcanggtgtggtagttacccaaattcctataaggcactttacggttttcacctgnccgggcggncgttaanggcgaattccanacacttggcggccgtttctaggggatccnaactcgtaccaagcttg

SEQ ID NO: 400 - DNA, 561 bp, Homo sapiens
  misc_feature (1)...(561): n = A,T,C or G
cagcgggcggccggncaggnntgaaagaancccancnacattatcctctccatacatttgcaattggcatggaagacagccccgatttactggctgctagaaaggtggcagatcatattggaagtgaacattatgaagtcctttttaactctgaggaaggcattcacgctctggatgaagtcatattttccttggaaacttatgacattacaacagttcgtgcttcagtaggtatgtatttaatttccaagtatattcggaagaacacagatagcgtggtgatcttctctggagaaggatcagatgaacttacgcagggttacatatattttcacaaggctccttctcctgaaaaagccnaggaggagagtgagaggcttctgagggaactctatttgtttgatgttctccgcgcagatcgaactactgctgcccatgggcttgaactgagagtcccatttctagatcatcgattttcttcctattacttgctctgccccaaaaatganaattccaaanaatgggatggaaaaacatctcctganaataacctttgaggat

SEQ ID NO: 401 - DNA, 446 bp, Homo sapiens
  misc_feature (1)...(446): n = A,T,C or G
ccaggagctaagcttgagtctcctttactgaatttcgttcttagtgcaggttacttgtagattctagtcttcacaggctccctggggctcttaactagtcacactgggagtcatgaatgtctttccaataattcagggaattctagagatcctcaaactgtaaggtctattcatactcaacacaaggaaaaaacctcattaaaattaatgactaatcaggaagcaacgtaaccaaaagcacagtgaatgaaagttttcatggtaggttcaacatgggtttattgctagaaagatccaggggatagctttaggtttaacttcggctcaccaacgtaactttctaatcatttatttcagtaatagctagaagtgggtctgaatgttttcccagagtctgataccgtgtttttttttgccagaaganaggtcttcaggagacttcattt

SEQ ID NO: 402 - DNA, 585 bp, Homo sapiens
  misc_feature (1)...(585): n = A,T,C or G
ccaaagcagccagggaagagtgccctgtgtttacaccgcccggaggagagacgctggaccaggtgaaaatgcgtggaatagacttttttgaatttctttgtcaactaatcctgaaagaagcggatcaaaaagaacagttttcccaaggatctccaagcaactgtctggaaacttctttggcagagatatttcctttaggaaaaaatcacagctctaaagttaattcagacagcggtattccaggattagcagccagtgtcttagttgtgagtcacggtgcttacatgagaagtctgtttgattattttctgactgaccttaagtgttccttaccagccactctgagcatatctgaacttatgtcagtcactcccaatacagggatgaagtctctttatcataaactttgaggaaggaaganaagttaaaaccaacgggttcaagnggtattttgtattgaaccctacagggatcatcttaaaanngggactggacttggaaaacttccctttaagggttnaaaatttggnattcaaaaaatcttaaccattttttgaaacccttttttaaaggggananngccat

SEQ ID NO: 403 - DNA, 527 bp, Homo sapiens
  misc_feature (1)...(527): n = A,T,C or G
ctgagcgatgaggatatcatcatgcactggtcggatagtgccctctggaaagagatcagcctggttccccagggggatccatgtcatatgcctggnatacactttgtggctcacgtacagttcgttgggggncagangaatctttagcagnatgggggttccgagtgcatctgacctggagacgaaactgtagagtatctatctctgngccttcttcatctccttgggtncgatactcaaaaagacggggatcagcatgaatgggaatgagccccagacggtgagcaagaatctcatcctgaacaatggatgtattattgtacaccaggaccttctccacagccatagttggcacctcagctncagaattcgtcnaaaagcattggcaatggctgcnanaattcccaccatgtcaaactccagtgagttttcatccatgtgtactacatccacaccggaaattcttctcgaancgggtcccttggtcccaaggcatcatcataaaccggaatagttacccgggaaaa

SEQ ID NO: 404 - DNA, 172 bp, Homo sapiens
  misc_feature (1)...(172): n = A,T,C or G
cctgatgggcgagtggtggggcagggcatgcctcagtcggagtcacaggtcttttgttcggtggcagcatccactgcagaggctaggctgtcttcctggcctttcagcctttcacggatcagctcgcaatgggccctctgagtccgcttttttagtttctccancttcttgg

SEQ ID NO: 405 - DNA, 552 bp, Homo sapiens
  misc_feature (1)...(552): n = A,T,C or G
ctaggtcctgncatttcctactggatgttctctcaataattgtgctgcccattatactcccaatgccggtgacacaacagtattacagtatgatgacatctgtaaaatagactttggaacacatataagcggatgattattgactgtgcttttactgtcacttttaatcccaaatatgatacgttattaaaagctgtaaaagatgctactaacactggaataaagtgngctggaattgatgttcgctgtgtgatgttggtgaggccatccaanaagttatggagtcctatgaagttgaaatagatgggaagacatatcaagtgaaaccaatccgtaatctaaatggacattcaattgggcaatatanaatacatgctngaaaaacagnncccattgtgaaangaggggangcaaccaataatggaggaaggagaantatatgcaattgaaaacctttggtagtcangaaaangtgttgttcatgatgatntngaaatgttcaccttacntgaaaaattttgatgttggacatcgccaataaagctncaaaan

SEQ ID NO: 406 - DNA, 545 bp, Homo sapiens
  misc_feature (1)...(545): n = A,T,C or G
ccagcccctccttgttccagccggtggtgtgacttcgttggttgaggtgtgtctccaacctacatcagaccatgaagttcaacccctccagggaagctcctgatttcccctgcataattgaaaataggatatttctcanctattgaacagttactaatttatggggtggaaacagcattaagaatactgaatcaaatggaaaaacaaatgaatacaggaagataagtgttcgttcttttctgaaaaanagtatgtgtaccacaagagctggttttaattgggtgaattgtttttgtcctcattctgtacagaaatttgnatatatgatggttcttanaacttgttttaatttttgtggtccttctgnttattataataggccgccaccaatgattatccatatgtgttcttaatttttaactgctggaagngttaaaacacacacacacacacacacacatttttttgagaactccaaagccctgaaaattttggnggacaatgatttttaccttgcccgggcggtcnttaaggggaattccacn

SEQ ID NO: 407 - DNA, 421 bp, Homo sapiens
  misc_feature (1)...(421): n = A,T,C or G
aaaatggaaaaggcccctattgatacctcggatgtagaagaaaaagcagaagaaatcattgctgaagcagaacctccttcagaagttgtttctacacctgtgctatggactcctggaactgcccaaattggagagggagtagaaaactcctggggtgatcttgaagactctgagaaggaagatgatgaaggcggtggtgatcaagctatcattcttgatggtataaaaatggacactggagtanaagtctctgatattggaagccaagatgctcccataatactctcagatagtgaagaagaagaaatgatcattttggaaccagacaagaatccaaagaaaataagaacacagaccaccagtgcaaaacaagaaaaagcaccaagtaaaaagccagtgaaaagaagaaaaaagaagagag

SEQ ID NO: 408 - DNA, 556 bp, Homo sapiens
  misc_feature (1)...(556): n = A,T,C or G
aaagagatttattaaatcatcttatcacaaagatggaaacatatacaaactagaaacatgcaaccatcatcttccacagtcaagtcacaatgtcaaatatttttcttgcctctgcagatgaaaagttcagatcttatacccaactacttactcaccccgaatatttaagtcagtcttcctgaaagtactcagggtagcaagtaacaaaatgcaaacgattatataaagaaagtgcagttaaaaaggaaactatgtggcaagtaccctctttcccttcccaccccccaattaaaggcaaacaatggcactttgctcttgcttaacctagattgtcttcaaaaactattaaaatgtaaaagacttaacaaaaaaacaaaaagacgtttaacagatgtcaaaaagctccttagtgtttgaaaataaatgcttaaacaaaagacaacatattttatatcaaacaagtttgaagagccctgaattgcagcattctgtaacataaacaaacaaaaagctggtatagggatttattgtcaaangcagaatttcttcaggcagg

SEQ ID NO: 409 - DNA, 522 bp, Homo sapiens
ccatcaaccacaaattggaaatcaagtacatagattctgcggacttggagcccatcacctcgcaagaagagcccgtgcgctaccacgaagcttggcagaagctctgtagtgctcatggagtgctggttccaggaggatttggtgttcgaggaacagaaggaaaaatccaagcaattgcctgggctcggaatcagaaaaagccttttttgggcgtgtgcttagggatgcagttggcagtggttgaattctcaagaaacgtgctgggatggcaagatgccaattctacagagtttgaccctacgaccagtcatcccgtggtcgtagacatgccagaacacaacccagggcagatgggcggaaccatgaggctgggcaagaggagaaccctgttccagaccaagaactcagtcatgaggaaactctatggagacgcagactacttggaagagaggcaccgccaccgatttgaggtgaatccagtctggaaaaagtgtttggaaaacaaggcttgaagtttgttgg

SEQ ID NO: 410 - DNA, 527 bp, Homo sapiens
  misc_feature (1)...(527): n = A,T,C or G
ccaaaggaatctgcagcaacttcttaaaatactgttaacatctttgggtttgctgaggcttgtcagtaacttacatcaaatcctcccaaaagaagatctgattagatagatatgactaaacggttttgtagtaataatccaattttacacattaatttgctgttgcaaatctgcccaaagctacaggtaatgaaaaataaagcaagtgtaaaatggatagtctgacacttaaaaatttatacaaagtggaagttaaagtttacatatttgaaaatcacatatacactaaattaccattatctgaattttccaaagacaaattgcaccatgacagctacaaaaggcatagggtttggttttaagggcacaagaagggagggcagaggagaggaaggggacaacagataaattaacaaagtaagaccaacttggtaaggtcaatctgagacatgctgacacaaatgaaacagctttcatctttgagtcatangaaaaagacaatcattttgtatttgcgcataaaagtt

SEQ ID NO: 411 - DNA, 549 bp, Homo sapiens
aaaaaaagaagcaagttctgaagttcactcttgattgcacccaccctgtagaagatggaatcatggatgctgccaattttgagcagtttttgcaagaaaggatcaaagtgaacggaaaagctgggaaccttggtggaggggtggtgaccatcgaaaggagcaagagcaagatcaccgtgacatccgaggtgcctttctccaaaaggtatttgaaatatctcaccaaaaaatatttgaagaagaataatctacgtgactggttgcgcgtagttgctaacagcaaagagagttacgaattacgttacttccagattaaccaggacgaagaagaggaggaagacgaggattaaatttcatttatctggaaaattttgtatgagttcttgaataaaacttgggaaccaaaatggtggtttatccttgtatctctgcagtgtggattgaacagaaaattggaaatcatagtcaaagggcttcccttggttcccactcatttatttgtaacttgacttctttttttttcttgcttaaaaatttcaattctcgggg

SEQ ID NO: 412 - DNA, 550 bp, Homo sapiens
aaagagatttattaaatcatcttatcacaaagatggaaacatatacaaactagaaacatgcaaccatcatcttccacagtcaagtcacaatgtcaaatatttttcttgcctctgcagatgaaaagttcagatcttatacccaactacttactcaccccgaatatttaagtcagtcttcctgaaagtactcagggtagcaagtaacaaaatgcaaacgattatataaagaaagtgcagttaaaagggaaactatgtggcaagtaccctctttcccttcccaccccccaattaaaggcaaacaatggcactttgctcttgcttaacctagattgtcttcaaaaactattaaaatgtaaaagacttaacaaaaaaacaaaaagacgtttaacagatgtcaaaaagctccttagtgtttgaaaataaatgcttaaacaaaagacaacatattttatatcaaacaagtttgaagagtcctgaattgcagcattctgtaacataaacaaacaaaaagctggtataggatttattgtcaaaggcagaatttcttcag

SEQ ID NO: 413 - DNA, 322 bp, Homo sapiens
  misc_feature (1)...(322): n = A,T,C or G
ctgatcaagactgganacaaagtgggagccagcnaagccacgctgctgaacatgctcaacatctcccccttctcctttgggctggtcatccagcaggtgttcgacaatggcagcatctacaaccctgaagtgcttgatatcacagaggaaactctgcattctcgcttcctggagggtgtccgcaatgttgccagtgtctgtctgcagattggctacccaactgttgcatcagtaccccattctatcatcaacgggtacaaacgagtcctggccttgtctgtggagacggattacaccttcccacttgctgaaaaggtcaagg

SEQ ID NO: 414 - DNA, 544 bp, Homo sapiens
  misc_feature (1)...(544): n = A,T,C or G
cctggcttcttcgggatgctccagaacaaaggactaacagactactgctttgactataaccctcccgatgaaaaccagattgtgggacaccaggtcattctgtacctctgtcatgggatgggccagaatcagtttttcgagtacacgtcccagaaagaaatacgctataacacccaccagcctgagggctgcattgctgtggaagcaggaatggatacccttaccatgcatctctgcgaagaaactgccccagagaatcagaagttcatcttgcaggaggatggatctttatttcacgaacagtccaagaaatgtgtccaggctgcgaggaaggagtcgagtgacagtttcgttccactcttacgagactgcaccaactcggatcatcagaaatggttcttcaaagagcgcatgttatgaagcctcgtgtatcaaggagcccatcgaaggagactgtggagccaggactctgcccaacaaagacttagctaagcagtgaccagaacccaccaaaaactaggcttgcattgctttgaagagcaan

SEQ ID NO: 415 - DNA, 546 bp, Homo sapiens
  misc_feature (1)...(546): n = A,T,C or G
ccacgtccatcggagtgtccttctcggtgggcgacggggtgcctgaggctgagaagaacgcaggggagcccgagaacacctatattctgcggcctgttttccagcagaggttcaggccctctgtggttaaaagactgtatccatgctgtgctcaaggaggaactggcaaatgctgaatattctccagaagaaatgcctcagcttacaaaacatttatcagaaaacattaaagataaattaaaagaaatgggatttgaccgatacaaaatggtggtgcaagtagtgattggagaacaaagaggtgaaggagtattcatggcttctcgctgtttctgggatgctgacactgacaactatactcatgatgttttcatgaatgacagtttattctgcgttgtagcagcatttggctgtttctactactgaatgaatctttgaaaagctggtaaaagacatgaccatgaagaaatctgaactttttaatattgntaaatatcttgacaaaataaagatgntagtagttcgaaaaaaaaaaaaaaaaaaaat

SEQ ID NO: 416 - DNA, 546 bp, Homo sapiens
  misc_feature (1)...(546): n = A,T,C or G
ccgggacctcatcagccacgatgagatgttctccgacatctacaagatccgggagatcgcggacgggttgtgcctggaggtggaggggaagatggtcagtangacanaaggtaacattgatnactcgctcattggtggaaatgcctccgntgaaggccccnagggcgaaggnaccgaaagcacagtaatcactggtgtcgatattgtcatgaaccatcacctgcangaaacaagtttcacaaaagaancctacaagaagtacatcaaanattgcatgaaatnaatcaaagggaaacttgaagaacagagaccagaaagagtaaaaccttttatgacaggggctgcagaacaaatcaagcacatccttgctaatttcaaaaactaccagttctttattggtgaaaacatgaatccagatggcatggttgctctattggactaccgtgaggatggtgtgaccccatatatgattttctttaaggatggtttagaaatgggaaaaatgttaacaaatgtggcaattattttggatctatcacctgtcat

SEQ ID NO: 417 - DNA, 375 bp, Homo sapiens; identical to SEQ ID NO: 143

SEQ ID NO: 418 - DNA, 512 bp, Homo sapiens
aaagtatatggaagatgtgcaaaggttatatgcaaatactgtaatattttatataaatgacttgagcacctgcagattttggtatccctgagagttcctggaaccaatccccttcagataccaaggaatgactgtacatgtttggtagaaaactagttgtctctacctagtctccattctggtcacttctttagtttcctaatttcagagtaaggccagtctccttctgtgatggttaattttgtgtcaacttgagtgaaccaagggatgcccagatacctggtaaaacattatttccacgtgtgttggtgggggtgtttctggaagtcattgacatttctactggtagactgagtacagaagatccaccctcaataatgtggatgggcatcagtccattcagtgccccatatgaaacaaaaaggcagaggaaggacaaaatcagcctctctgcttgttctgggacatctattttctcctgctcttggatatcagtacacttgcttctctgg

SEQ ID NO: 419 - DNA, 539 bp, Homo sapiens
  misc_feature (1)...(539): n = A,T,C or G
aaaaaagcacctccttaccccatatcacgtttctctgacaggtgttaaagtaggcaatgagtatgtcaacagcttgagcatcagcgtcttgcaaggacttcagaccaaccactcgccaaaaatcttggcagctttttatcttgtttttaatacaacggtatatccactctgatggcaaacctatccagccacatctccacaacaagctttgcaaaatcagtgattagcaaattagttagctttggcacggagctgtgctcgcttgcccgtgacagcctggaagccggttttgatactggcaacagaacatctagaatgacaagtttcgcactgtaggaaatagagtcgtgtgtccttctgcaggattgtgtccggtgatcggcatgtgtgacaagtgacatattccttgatatatcttctcaagacattttctatctgtttctgttggaatcttcctttgattacaagttggttattaccatctatagaaccacttgtacccaattcagccaacaaaaatgcaaggagatgttttggng

SEQ ID NO: 420 - DNA, 538 bp, Homo sapiens
  misc_feature (1)...(538): n = A,T,C or G
ccagcagtacccanagaaaatgggcagcagcaggtaaaccagccaggaggtggagtcctctgaacccacagcagaccccaccctcctgcccagcccctgcccacattgggggtcaggaccactgaaactntggtcangacagtgggtgctctcagcagtgtggcaagctcagagcagagctcccaaggaccataccacactggttcaaaacccataggtgacaccatcccagcagaagcttccatgggtgctggatcccagggctgcatcctgagcacaggtgggcagactggaacataacactaggacccaagggatccagaacattttaggcccatctcctgggctgctccagcctgttgccatgacttgggcaagtgagtgggcctccttgccaggtggnagggcacanntttanaccaaaccctttggcctcccccttntgcagttacctntgaccaaaaaggaactancaagcctntgtggnaanaccataggggggggtgctgggaatccttggggccggntggcccccnnn

SEQ ID NO: 421 - DNA, 295 bp, Homo sapiens
cctgggctcgcctggaccacaagtttgacctgatgtatgccaagcgtgcctttgttcactggtacgtgggtgaggggatggaggaaggcgagttttcagaggcccgtgaggacatggctgcccttgagaaggattatgaggaggttggagcagatagtgctgacggagaggatgagggtgaagagtattaacctgtgtgctgtacttttacactcctttgtcttggaactgtcttatttttgttctgtaaatgtctattgccgtaaattgttaataaaattgatgtttccatttt

SEQ ID NO: 422 - DNA, 422 bp, Homo sapiens; identical to SEQ ID NO: 5

SEQ ID NO: 423 - DNA, 446 bp, Homo sapiens
aaggtgctccttgccgccgccctcatcgcggggtccgtcttcttcctgctgctgccgggaccttctgcggccgatgagaagaagaaggggcccaaagtcaccgtcaaggtgtattttgacctacgaattggagatgaagatgtaggccgggtgatctttggtctcttcggaaagactgttccaaaaacagtggataattttgtggccttagctacaggagagaaaggatttggctacaaaaacagcaaattccatcgtgtaatcaaggacttcatgatccagggcggagacttcaccaggggagatggcacaggaggaaagagcatctacggtgagcgcttccccgatgagaactttgccaaacaccacatgcttgccatctagccaggctgtcttgactgtcgtgatgaagaactgggagccgttggtgtctttgcctgcgttgg

SEQ ID NO: 424 - DNA, 531 bp, Homo sapiens
  misc_feature (1)...(531): n = A,T,C or G
aaaaactgactaggtcaaaaatagttacgcctgcaggttgacctattcagactttgccaaactcctccaagttcaatataaattgacgttttcagagtacaaagtcaattttacggaaacgctgttcctccttttccatggagccaatctgggtaattttttcattaaaattcttcttctgcctgtttgctgcggaactctttgagctgctgtagccgctcgatagtttcagaaatggtgcgttccccgtggaccttattgtctcttgtgcggatattaacagtgccactgattttctctttttcaccaacaactaaaatgaagttatactgtgctaactgtgcatttcgaatctttttattcaatgtacagcctggatccagatcaatgtctgccatgaatttggcatcgtggaattgttgtcgtaccttttgggcatattcatcacangttggtcccactggaactaccattacctggcgaggggacagccaaaagggccttttgccccatagtttctgtgaggatagn

SEQ ID NO: 425 - DNA, 406 bp, Homo sapiens
ccttgagagcccagcccttgcatcagtgtagcctggacgtgaggcatggagtcaaaagagattattttggagctttaagattcaatggctgccctgctgggttttgaacttgcacgtggcctgtagccctctttgttttgcctgatttctctcttttggaatgggagtgtttagccaatgcctgtgcccctattgtatcttggaagtaactaacttgtttttttattttatagactcatgggcagaagggacttgccttgtctcagatgagactttggactgtggacttttgagttaacactgaaatgagttaaaatttaggggactgttgagaagagattattgtattttgtagtgtgagaaggacatgatatttgggaggggttggggtggaattatatggttt

SEQ ID NO: 426 - DNA, 322 bp, Homo sapiens
ctgatcaagactggagacaaagtgggagccagcgaagccacgctgctgaacatgctcaacatctcccccttctcctttgggctggtcatccagcaggtgttcgacaatggcagcatctacaaccctgaagtgcttgatatcacagaggaaactctgcattctcgcttcctggagggtgtccgcaatgttgccagtgtctgtctgcagattggctacccaactgttgcatcagtaccccattctatcatcaacgggtacaaacgagtcctggccttgtctgtggagacggattacaccttcccacttgctgaaaaggtcaagg

SEQ ID NO: 427 - DNA, 418 bp, Homo sapiens
  misc_feature (1)...(418): n = A,T,C or G
cctgttctgggagatggtcatattcacctgccaaaatctgctggaatcctttgatggtctccttcaggggtaccagcttccccatatgacctgtgaagacctcagcaacctggaatggctgagacaagaaacgctgtattttccgtgcacgggacacggtcaacttgtcttcctcagaaagttcatccatacccaggatggcaatgatatcctggagggatttgtagtcctgcaggatcttttgcaccccacgggcaacatcgtaatgctcactgccaacaatgttgggatccatgatacnagangtggaagtctaaaagatncacanacctnggccgngaacacccttaagggcgaaattccacaccacttggngggccngttncctaannggaancccaaacttngggancccaaa

SEQ ID NO: 428 - DNA, 386 bp, Homo sapiens
  misc_feature (1)...(386): n = A,T,C or G
aaatctagatagaaacacctgtgattgaattagtgcatggtaatgcatggcatatacattgcttaaggtggtaataaggggtcagatgctctacagcaaccttcaagcacaggcaccgatttgcattttatgcaaaacttcaggttttactcaatttttacactggtggaagctgatgtcagtaacttaaaaggcaagcaaatacttttccaattcttagctgaacaaaaaatacacacaatgtagcgtttttattgggcaagacttgctttttatatttcacgtgagaatgcaatataacccttccttgaacaaaatgaccagggtactaataaaaccatctttgcaggaatggttaataagcatattttatttaccttnggccg

SEQ ID NO: 429 - DNA, 452 bp, Homo sapiens
  misc_feature (1)...(452): n = A,T,C or G
ctgattcagatcagagggaaagaaataccaaccctgcaataagtgtactaaactctacgctctggttaatgtaatgtactctcctggactgaatgcagtgtataatttctgtctacagctagaagctgtgccccagttccacatttgattacacatgtgagatttgctgctgttgcagtataaacactaggtataataggatttgaaattgcattacagttcataaaaattgaaaatgagaaattaaacctgcaagtgaaacatttgaaacgattatactttctacataagacatggttgggacatcagatacttacaaagatggtttaaagtatggatactagaaaaaattaagntctctttctctttnggttaatggattgggntnaatttccattatgctatttgcataatcaaggcactgtaaatcttataattttacctgcccggcg

SEQ ID NO: 430 - DNA, 560 bp, Homo sapiens
  misc_feature (1)...(560): n = A,T,C or G
aaaggtgataggtgacttaataattttccactttcaaaatgggtttctagacactgttgttcatgaaccaaaaacaaacaaacaaacaaacaacaacaaaacccaaacactttggcaagcaaagtattattagtacatagcagcttcataacagtttacttttttaatataaagatttttcaatttacacttgtaggagtagaaaaaactaatatgctaagtctgtaagctacgcagcaaaaataatgatcttaatgaagccagaattctgtgaaaatgtgcaccacactgcatatatagtagctgagtaaatgtaaaccatgtgcttattaactcttctatataaaatattgaacccccaagtctccacattgccttctatgtcccattacnttttcttganacagcctcatgcttaagccaatatatattgctatttgaaaaagttctcatcctcattctaaaatgtttctgtaangacctgccgggcggccgtcaaagggcnaatccacaactggcggcgtctatggaccactngnccacttggcgaatntggcata

SEQ ID NO: 431 - DNA, 429 bp, Homo sapiens
  misc_feature (1)...(429): n = A,T,C or G
aaaatgttcatgtagaaaattaatgaactataggaatagctctaggagaacaaatgtgctttctgtaaaaaggcagaccagggatgtaatgtttttaatgtttcagaagcctaactttttacacagtggttacatttcacatttcactaatgttgatatttggctgatggttgagcagtttctgaaatacacatttagtgtatggaaatacaagacagctaaagggctgtttggttagcatctcatcttgcattctgatcaattggcaagaaagggagatttcaaaattatatttcttgatggtatcttttcaattaatgtatctgtaaaagtttctttgtaaatactatgtgttctgggggggcttaaaaattccaaacaaatgatccctgcntttcctgaagatgtttacctcgggccgcaccacgc

SEQ ID NO: 432 - DNA, 599 bp, Homo sapiens
  misc_feature (1)...(599): n = A,T,C or G
ccaatactcccatttggttttactggcggcatttgattgtattgatgatactaagcttgtgaagcagataatcatatcagaaattatcagttcattgcctagcatagtaaatgacaaatatggaaggaaggtcctattgtacttactaagccccagagatcctgcacatacagtacgagaaatcattgaagttctgcaaaaaggagatggaaatgcacacagtaagaaagatacagaggtccgcagacgggagctcctagaatccatttctccagctttgttaagctacctgcaagaacacgcccaagaagtggtgctagataagtctgcgtgtgtgttggtgtctgacattctgggatctgccactggagacgttcagcctaccatgaatgccatcgccagcttggcagcaacaggactgcatcctggngggcaaggacgganaactttcacattgcagaacatnctgcagggacatctagttcttgaagtggttaatngagtangaataaaangatgaaagnaaaatgggagaanaaggttgntttgcaaaaacacttgtanaacatgtnggtatgaaaaacctgaaatcctggctt

SEQ ID NO: 433 - DNA, 227 bp, Homo sapiens
atagtctgcgcagcgtatgcacacgaactgccaaaatatggtgtgaaggttggcctgacaaattatgctgcagcatattgtactggcctgctgctggcccgcaggcttctcaataggtttggcatggacaagatctatgaaggccaagtggaggtgactggtgatgaatacaatgtggaaagcattgatggtcagccaggtgccttcacctgctatttggatgcagg

SEQ ID NO: 434 - DNA, 613 bp, Homo sapiens
  misc_feature (1)...(613): n = A,T,C or G
aaaaaatcatacggacaaacaactttcaaacaaaactggattagtaggatttcttgcctgcttaactaacatgacagacttcttgtcccaagcccttctcagaaaaacctcatgtggaaaccaagctagagataagaattcttccctgatgcagttaggggaaagggaaaggctagaaacttctttggcaagcaattccacacacagccatttatgtgtgagtgctctgcttcaagcacagtacactctttgcagggacggccagatgttcagagtgggagtggtacttttcaaccagctaaaagtgcagaagtcatctagtcgtctgcctcttcccactgccagtgcctgcagcctttgcagcaacttttaacccccctatggactggaatattgagtttaaaagccaaggctganctggctgacgcttgtantctccattgaaaaaggaaatggatgggatggaaccgagaaaccaccagtnccttgatgaaccttcaaaanacttagggggggaaaganaaaggaaggatttcananatnggggacagaatggngggaaaatgttgggctnactggnaaggaaatggggnttccctgnntaatatgtnca

SEQ ID NO: 435 - DNA, 322 bp, Homo sapiens
ctgacccccctttgtccacagctaagatggcagcagaatgctatgtcactatatacagaaacaagacaacctgaagctaaatggatgccccctgcagagtcaacaggtccagcctcacagtgcacgccctgagctacagcctctcccaaaaggcatcttccccacagcctcaacgccgagcaaggagcatcaagggtttgtctcggttgttttgttctttttacaaactatagatatatacagttgaaaactcaggatttctagccaataaccatagttaccaccaccttacaaataaaaagaaaatgccagaaacatcttt

SEQ ID NO: 436 - DNA, 267 bp, Homo sapiens
ccaccctggagcgctatgtagagacgcaggccaaggaaaatgcctatgatctggaagccaacctggctgtcctgaagctgtaccagttcaacccagccttctttcagaccacggtcaccgcccagatcctgctgaaggccctcaccaacttgccgcacacagacttcaccctgtgcaagtgcatgatcgaccaggcacatcaagaagaacggccaatccgacagattttgtacctcggggacctgctggagacctgccatttccagg

SEQ ID NO: 437 - DNA, 625 bp, Homo sapiens
  misc_feature (1)...(625): n = A,T,C or G
cctgagaccctcaacagtgctgtgtgtacagaaggcccccagaatccacacaaaggggccgcctgaaacctagagcatttgtgaaggaggaaaatggaaggaacaactggatgttgtaaatgtttctcatctggccttaaaatccatgaaagctggaaaatcacaaggcatctgtgcatatactggtggattttaatgagagtcctgtgtttggagcaccagaaataaaccagcttcagaagcaaagttaacaggaggaggaagcagagctagagatggaaggagacccagccagcccgggctccagtgacatcggctggtacacgcttttgtttgcttacgcttgttgaacttgagttttttattttgtaactaacgaatactggcacatgatctgaacctnttttgacacttntttttnaagcttgacccagtggaagaaccttangaanggagaaactcncccantcttgccngggtcacaanaatgatcattcttnaaaaattttcctnggggagtnaatgggnaaatttnncttgggctntttttcccgattgaagaaggaaccttnaagnaagggtttggggaccccgaantnccggaacacccccntaccttatnttt

SEQ ID NO: 438 - DNA, 431 bp, Homo sapiens
  misc_feature (1)...(431): n = A,T,C or G
ggtgttaatactttcaaagttcttacaagggataaacgtcttgtacccggaggtggagcaacagaaattgaattagccaaacagatcacatcatatggagagacatgtcctggacttgaacagtatgctattaagaagtttgctgaggcatttgaagctattccccgcgcactggcagaaaactctggagttaaggccaatgaagtaatctctaaactttatgcagtacatcaagaaggaaataaaaacgttggattagatattgaggctgaagtccctgctgtaaaggacatgctggaagctggtattctagatacttacctgggaaaatattgggctatcaaactcctactaatgctgcagtcactgtacttaaaagtggatcaaaatcatcatggcaaaaaccagaacttgcccggcnggccgttcaa

SEQ ID NO: 439 - DNA, 573 bp, Homo sapiens
  misc_feature (1)...(573): n = A,T,C or G
ccaagtcaaaattgggcccagcgtctttctttctgtcttatgacagaccagcctccagccttggtgtggtatctacatgtagccctgcgtaccctgcttctttttagcattcaaggcccactcagggcctcaaattagccaatggtgaatatggatataggacttttagagggatgcaggttgagttgtacataacttagaggtgaagtgcaggtccgaaacagggctagactttggagaactgtaaaatggctcactgagcatgacagcatcaggacccctggagtggctttcaaacttaccttcttctgcaggctacttctggaaatccctaggacttaccagctttctgaacactgcgcatcatgggaaggtgaaaaagaaaaagggctagttaaaatcttgnttttctggggggccaacttangaggagcctaaagctaacccttgggcttgacantntacttttaccttactacactgtgcaatgaatgccnangccanataaacctnggccnaacacctangggaatcaaccctggggccgtctanngaccacttgnccaaattgng

SEQ ID NO: 440 - DNA, 303 bp, Homo sapiens
cggaaaatggtgaagaaaattgaaatcagccagcacgccaagtacacttgctctttctgtggcaaaaccaagatgaagagacgagctgtggggatctggcactgtggttcctgcatgaagacagtggctggcggtgcctggacgtacaataccacttccgctgtcacggtaaagtccgccatcagaagactgaaggagttgaaagaccagtagacgctcctctactctttgagacatcactggcctataataaatgggttaatttatgtaacaaaaagaaaaaaaaaaaaaaaaaaaaaaaaa

SEQ ID NO: 441 - DNA, 525 bp, Homo sapiens
  misc_feature (1)...(525): n = A,T,C or G
ccaacttatatgattttttttttgtttttgtcgtgtagttatggcactgtcttatttggaacatttgcagctagggataatacaacatttttaactntcatttgacaacctactactaatcacagaccacaagggtaatgaccaaatttatgtggtttttgcactccatagttgtcttagcccaatctttctatactcttacgattacttgggttaacgcttctgtgaggaccttctggntcttgagataccctaaatatttaagatatttanatatcttgaanatagtataggatatagagattgtaccaaataggaatataaggagtattgttaaaatgaccagatcccgtttgatngttttacntgacctaaccaaatgtntggaaaaaggaaatcaaaaccttggatttttcnggggttnatncctgggtgncaannccgaaanggntcccgaaaaggcnttcccttggttnaaacngggaanntgaaacaaaaaactttgggtntttagaatcacttttt

SEQ ID NO: 442 - DNA, 83 bp, Homo sapiens
ggagtttgcagtgagccgagatcgcgccactgcactccagcctgggcgacagagacggagagactccgtctcaaaaaaaaaaa

SEQ ID NO: 443 - DNA, 618 bp, Homo sapiens
  misc_feature (1)...(618): n = A,T,C or G
ctggaggccctgctgagctccctgcccccaccccaaagccagaaggaggcccaagttgcagcccgggtttggagggagtttgagatgaagcgaatggatcctggcttcctggacaagcaggctcgctgccactacctgaagggtaaactgaggcatctcaagactcagatccagaaattcgatgaccaaggagacagcgagggctccgtgtacttctaagtgcccctgcagatgggcagagggatgcatggggatgcaggtcccttgcatttcttggtatctctcagcttttcctcttgcagctccccctaccaggggtcgctttctcctggattgcaaatgccttttcagtttggactcagcttntgacacccctcttcangaaggcctaccacctttagaagtcnacctgtgggcaatgtgggtaccctgncaagcncaaaaaaaagtataactgggagtgcccagggttaaaanaanaaatnccaccngaacttggtcnnaatgangcaccttaaaaattgttnccccgaaaattngggcatggattccgtggaaggaacaacccttaaacccaaaaagggcaaactggccgggggggcntttnaaagggcgant

SEQ ID NO: 444 - DNA, 454 bp, Homo sapiens
  misc_feature (1)...(454): n = A,T,C or G
ccactttctttcccacctgggaaggcggcatctatgacttcattggggagttcatgaaggccagcgtggatgtggcagacctgataggtctaaaccttgtcatgtcccggaatgccggcaagggagagtacaagatcatggttgctgccctgggctgggccactgctgagcttattatgtcccgctgcattcccctatgggtcggagcccggggcattgagtttgactggaagtacatccagatgagcatagactccaacatcagtctggtccattacatcgtcgcgtctgctcaggtctggatgataacacgctatgatctgtaccacaccttccggccagacctgccgggcgggccgttnanggccaaattcaacanactggcggncggttactagtggaacccancttnggnacccaacnttggnntaatcattggtcatannntgtttcc

SEQ ID NO: 445 - DNA, 345 bp, Homo sapiens
aaatgacgaaactcagcggaaatatattcagggattgaagaggttaatgaccatttgccagaaacactttcctacagacccatccaaatgtgtggagtacaatgcactgtgagatctgtgtatggtgtgttaataacaataagaaacttagggaagcaggctgtggacttctggaattaccaacaggaatgaggaaagaagaaaactggagtttccagtctctgagttctacccgatgtaactcttgattggttttaagaactttgttggccttcatttcatatctgactgcaagctgatttttctttcttgctttcattttaattaagtccaaaattaaatttt

SEQ ID NO: 446 - DNA, 451 bp, Homo sapiens
  misc_feature (1)...(451): n = A,T,C or G
gcatttacgcattcctccagtcttaataatcacatgcggacccacagcgccaaaaaaccattcacgtgtatggaatgtggcaaagcttttaagtttcccacgtgtgttaaccttcacatgcggatccacactggagaaaaaccctacaaatgtaaacagtgtgggaaatccttcagttactccaattcgtttcagttacatgaacgaactcacactggagagaaaccctatgaatgtaaggagtgcgggaaagccttcagttcttccagttcctttcgaaatcatgaaagaaggcatgcggatgagagactgtcagcataaggaatgtgggaaaacctaaaggtgtcccttgttctcntctggaangacatnaaaacttaccttggggganaaaacccttntgaaatgtaaaaatggtggnaagcaactttgtntntnaaggtnttaaatg

SEQ ID NO: 447 - DNA, 592 bp, Homo sapiens
  misc_feature (1)...(592): n = A,T,C or G
aaaaatatatggtcaggaggagactttacagtttctctttacaaacggtatataatgggagaaatggccttgtggcagaggacagtcccagacagcagccttgccacagctcaagtagacacagtccttactaagtctccacgaagagcagtagctggggagggcttctgatgctcttatttacaatcccacaatcactgctctccttcaagtctagcagtcccactgtatattgcaacttgatcgtactaaagaccgacagcaaaggatacagccagtctcgcctctgtgaagtgttgcagagaacctggagagtgctaatgaaaagctgntttaccaaaaaagttgccacgggcaacctcatatactttaggcttatgtttagaaaagagcaagggntgctacttggtagacacttggaaattccaaagtgtttttgngaataaaaatgntgtttatngtaacttaagggaaaantcgtaattnggacancaaacatggtggnttttcatgtnnatgaagttagacaagctgactccctcctanaaanctacctttnggccntttttgngccaaatcccntgaagcccac

SEQ ID NO: 448 - DNA, 470 bp, Homo sapiens
  misc_feature (1)...(470): n = A,T,C or G
aaaggtatttgctcattggtctggcttagagacaggaagacatatgagcaataaaaaaaagattcttttgcatttaccaatttagtaaaaatttattaaaactgaataaagtgctgttcttaagtgcttgaaagacgtaaaccaaagtgcactttatctcatttatcttatggtggaaacacaggaacaaattctctaagagactgtgtttctttagttgagaagaaacttcattgagtagctgtgatatgttcgatactaaggaaaaactaaacagatcacctttgacatgcgttgtagagtgggaataagagagggctttttattttttcgtncataccgagtnttgattgaagatgattcctaaaatgctaaatgnaaatatatttgcttcccaaanggnntttatttctgnctttgggngatgcnaccaaaaaccccgaaagtnggaatgnaagtgatnccttttc

SEQ ID NO: 449 - DNA, 434 bp, Homo sapiens
  misc_feature (1)...(434): n = A,T,C or G
aaaaaaagaagcaagttctgaagttcactcttgattgcacccaccctgtagaagatggaatcatggatgctgccaattttgagcagtttttgcaagaaaggatcaaagtgaacggaaaagctgggaaccttggtggaggggtggtgaccatcgaaaggagcaagagcaagatcaccgtgacatccgaggtgcctttctccaaaaggtatttgaaatatctcaccaaaaaatatttgaagaagaataatctacgtgactggttgcgcgtagttgctaacagcaaagagagttaccgaattacgttacttccagattaaccaggacgaagaagaggaggaaagacgaggattaaatttcattttatcttggaaaatttttgtatggagttcnttggaataaaacttgggaacccaaaatgggtgggtttatccctt

SEQ ID NO: 450 - DNA, 548 bp, Homo sapiens
  misc_feature (1)...(548): n = A,T,C or G
ccacagctaacatcattgcagcacctttactccttcggctgtgatccaatctccagctcacttctttttgccagcaccaacattggcctttgcagtccccctgactttcttcattctgttcttgcgttcctttcgttgctttcttgaggtctttttcttctcatacaggccatgtcttgcaagtctatgtttgggttcatttttctttgcataatccagggaatcataaatcatgccaaagccagttgtcttgccaccaccaaaatgagttctgaatccaaatacaaagatgacatccggtgtggtcttgtacattttggctagtttttcccgaatttctgtcttaggcactgtcgcttcccggggtgaaggacatcaatgaccatttgtttcctctgaagtagtcggttggtcatgaactttctagtgcggatagttaccggggtcgacctcggccgcgaacacgctaagggcgaattccaacacactggcgggccgttactagnggatccnacttnggnccaanttggcgaanaatggcataatgg

SEQ ID NO: 451 - DNA, 426 bp, Homo sapiens
  misc_feature (1)...(426): n = A,T,C or G
aaacttgtgataggcatatctatgaaacctttgtaaatttagtttattgctttaccattattttactaggtaaaattagagaacagattttgttctctaatttttaagccttatttacatatgcagaaacagcttaaatattttgactagattagacaaacagttaatagatccaccattaggaatcaatatattatgtcataataaacatcctttttctttcactgaaatttcttttagaaataaacttatttttgcttgttatgttttgaaacttgacataggatattttccctctggctacacattcacctacccttgttctctatttagattattcaaataaagttagtttgcttttatagtcaaaaaaaaaaaaaaaaaaaaaaaanttggnccccncccngggggcnttaaaaggggaaa

SEQ ID NO: 452 - DNA, 410 bp, Homo sapiens
  misc_feature (1)...(410): n = A,T,C or G
ctgtctcaggatccaaggaacgtttgggttttcctagctacatctggtaccttggctggcattatgggaatgaggttctaccactctggaaaattcatgcctgcaggtttaattgcaggtgccagtttgctgatggccgccaaagttggagttcgtatgttgatgacatctgattagcagaagtcatgttccagcttggactcatgaaggattaaaaatctgcatcttccactattttcaatgtattaagagaaataagtgcagcatttttgcatctgacattttacctaaaaaaaaaaaaaacnccaanttngncggagggggggaaaatcantngtaaccnttttaaccntacanaaggngggggagcttntaanatngaccttattganaccntcttaaaaaccatt

SEQ ID NO: 453 - DNA, 385 bp, Homo sapiens
ggaacagcttatgtggtctatgaggacatctttgatgccaagaatgcatgtgatcacctatcgggattcaatgtttgtaacagataccttgtggttttgtactataatgccaacagggcatttcagaagatggacacaaagaagaaggaggaacagttgaagcttctcaaggagaaatatggcatcaacacagatccaccaaaataaatgttttctacattttcatttggactaaatcccacgaatgacaactaccacctttttttcctttttaattaatactaaatattgtgatttcttatttgaggttcaaaatgacctgcttgaaactttgatacatattggaatacattatgttaataaacttgtagctttttgtgaaact

SEQ ID NO: 454 - DNA, 467 bp, Homo sapiens
  misc_feature (1)...(467): n = A,T,C or G
cctttatacacatatgtctacacatagggatttggatgatctcgggatcccacatcctcgctgtcccctgtccccccgcaacatcccccaccaatacctttctgaagttttctagtccctcctttttgtttgtgctccttaaagcccagccccatgcctgactttggttcccagtgagcattgtacatttgtggatattaaatctttggcaaagtcatttacctgggctggaatagggctcttggctgattctttttcctaaacacccacccaatgggagaggctgatactcaacatgcaaaccttgtgttttatttctccaggcgaagggatgttggaagacattctggaaggggtggggtgtgaagatttacaaataatctttgaatatctgcttnatgataggtcttggaggngcctngngggtgngggtttggggggangggtacnaggaaattgnggatntt

SEQ ID NO: 455 - DNA, 601 bp, Homo sapiens
  misc_feature (1)...(601): n = A,T,C or G
gctncaatttcaatgagaccttttgcattttttctcaaagcccttatgttctaacccatgagaaccattttacctgccctctaagggccaccagcttcgacctgcctcaggagacagcagcacagaccagtggctccctgtccaaggccgcagagcagacgccatcccactgtacaatcgaatttgctggacaaacttgataggtttctctgcttagcaacgagcctatagttagttggcacatctgcgttttggcatctgaggctcccatctgagtggaggagaaagtgttgtgtttattagcaggaagtcttgtgaaaacagctcgctgctgtgtatgtttatggatttttctgatataacaagccagcatggttaccgagtggtagagattctcgaacattctcaaactctcttttttgggtaaatgaatggtgcttaaaaataaaatttattaataaagaaggggaaaaaggagtaactctccctgactaaangtactctaattaattatttctttccaattaagnaaacccggaagnntgatttcatcacccnaaaatttttgaattttagggaaccttttgccccnaaagatcnt

SEQ ID NO: 456 - DNA, 272 bp, Homo sapiens
ccttacattagaagccaagccaatcctttttcctttttttggaggtcccaccgagatagataggaacttggattgctgaattcaaaaacagagcccattcttaagatcacttggtgccttaaagacacgcattccaaagtggaatgtggttgaagaaagtgggccaggtggttgaagaaagccatgtgggagctcagcaaatcccaagggcttattatgacactccagatggtctccttagcatctcagctcttctgcaaggaagagcttgg

SEQ ID NO: 457 - DNA, 431 bp, Homo sapiens
  misc_feature (1)...(431): n = A,T,C or G
aaaatttagattagcacaccttactaatctgacagaacctggattctcttgatattggaagaagatgagagtggataccggggaagtcactagaagtatctgtcactcttggctggacagcaggctgcaaacatattaccacttgatggaggcatcatgctctggtcgcaatccgtgtgcatcaggtaccagtaacaaagtggtactgagaaatatcctcatgtcacatagatctcaatatgccattggtcaaggaggttgtccagaaggaaattaggacgttatcaaggatgaagctatagtaaaaatactataaacaaacctttcttgatgaggcttaagggttatttagaggagtataaccttaaaaataaagatgaaaaatttatgaacngggctcttgttttcatgatgagagagtcgtgcagtcc

SEQ ID NO: 458 - DNA, 571 bp, Homo sapiens
  misc_feature (1)...(571): n = A,T,C or G
aaaaacattacttgaattaggattacacaaaaaaaactaaattctaagtgagcacaactatcgctgagaccctgaaatttcaggaaataaacatggttcaaaactcaaactgttcatcaaaataattacgcaggtcagccaccactgcagaaccatcactgctcagaggaattgagtcagcaatgactgatctcatcatctcttcattagcacataagcggttcaacttgggatacgcaaggagtctctgcagaggtacgaaaaatttatctccaacacagaagggtgtgggagagttctctatcttggccttctcaacctctgtgaagactggtccaaagcatgggacaggggcctttgagccaccaatgtctttgggcttatcaccccgttccccagcctgttctttccgcttggcaggtggntcactcttaactttcacttgttgggacacctcattaccacacaagtttacctgcccggcggccgntcaaaggcgaattccnccactggcggccgtactagnggatccgactcggnnccaacttgcgaaanatgggcatactgttcc

SEQ ID NO: 459 - DNA, 509 bp, Homo sapiens
  misc_feature (1)...(509): n = A,T,C or G
aaaaagagcacattccattctggtgcacacaaatgtacattaaaaataaaataaaaaagtgtaagagtacatttcaagggaatccctgcctctcccttggctcgctggcaaatgattcacaaccaaaacatttctgggatatgtgacttaaggaataaaaaaactcagtgttttataaaagggaatggcaggatgaggaaatgatttatcaagatacaattttactaataattacttctcaaataacttaaaaatgttttataacaaaaaatcaaaatgaaacaaaacttggtagttgaatataagtattttcaactgttacaatacttgaggagatttttcggtctaatttctcagaaattaggccnaaagaatagctttntttaacagaatnctaaaaaaatttcaatgtgaangantnatctaggattacaanacttatnttttacaannacatccatnntttcttaaaatttanttgttaggggtctnaagttaaannagccttg

SEQ ID NO: 460 - DNA, 253 bp, Homo sapiens
  misc_feature (1)...(253): n = A,T,C or G
aaaggctttctttgagctcatttgtaggcttatctacctactgagtaaagtagttgggtgtcctaattttattaataggattaatttttattataaatcattagagatgttttgatactttagttaaaactgctttttagtaaatttgtttttctttgcagatatgagggaaggcaccattggagatatggctatcctgggtataacagaaagttttcaagtgaagctacaggttcttctgagtgcnnctgaa

SEQ ID NO: 461 - DNA, 569 bp, Homo sapiens
  misc_feature (1)...(569): n = A,T,C or G
ccagcccctccttgttccagccggtggtgtgacttcgttggttgaggtgtgtctccaacctacatcagaccatgaagttcaacccctccagggaagctcctgatttcccctgcataattgaaaataggatatttctcagctattgaacagttactaatttatggggtggaaacagcattaagaatactgaatcaaatggaaaaacaaatgaatacaggaagataagtgttcgttcttttctgaaaaagagtatgtgtaccacaagagctggttttaattgggtgaattgtttttgtcctcattctgtacagaaatttgtatatatgatggttcttagaacttgttttaatttttgtggtccttctgtttatttataataggcgtccaccaatgatnattccatatgtgttcttaatttttaactgctggaagtgttaaaacacacacacacacacacacacattttttttttgaaactcnaaagtcctgaaaaattttggnggaaaaatnatttttacttgcccggggcggccnntcaaaagggnnaattccacncatggnggnccgtt

SEQ ID NO: 462 - DNA, 402 bp, Homo sapiens
ctgctgttttcctggaatagtccttgagtaatcccgcaggtacttggagagttccatctcaatggccccgccaccagccaccactgaatcattcttgatggccctcctgacgatcatgatggcatcatgcagggaccgctctgtctcctccataaactgctcggcgccgccacggagaatgaaggtgcatgtcttggccttggggcagccagtaaaaaaattgtacctctcgcctccaatctgggtctcttcaaacacctggcatcgacccagcacatctgctgacagagcattcacactggtctggattgagcctccacaggccatcattgtcctcttcagatcctcctcaggtactcggccagcacagaacatgtccctgtcagcaaaagtactgggtgg

SEQ ID NO: 463 - DNA, 569 bp, Homo sapiens
  misc_feature (1)...(569): n = A,T,C or G
aaattttgtagccattcttatgatgctcttgatttgttggttacacaaatcaattttattaaaaatccaaagataagtctttaggtatattttgtaccaaattaaattagaagataaaaattgtgctttcatagttgctacaaaggtaaataatggagagatttggtacaaaacaacaaaatatatatatattctcatatatatatatatagctgataaaattacctgaggagtgtaatgtttatttttttgtgtatatctttgcaatctattttatatatattgacaaaagagactgtgaaatacttagccatgcagaatatgtgaccagaccagagcatgtgtaggaagactttacngtaatcattaactctccccgaaatgatggactacaagttataatgtgtgttacctacacttcaatcagtaatattagcaaatctncaaatgttagtcacattgggttggnctcccttgnacatctttattcatggatttacaanngcttgnactgggggggcctttttaacttgggccgnaacccccttaagggnaattccncncactgg

SEQ ID NO: 464 - DNA, 221 bp, Homo sapiens
  misc_feature (1)...(221): n = A,T,C or G
aaataaattcacacaaagaaagagaaatagaaagcgacggtagtgaccagcaagaggaataataattacattcatcttaatgtgtgtgtgccagttctgtttacattaacattggaaaactccagacctggaatccagaacctcaaatctgtgagtggaatgtcttgagatgggcacgtggaagtcaaagggtttctcttttttttttttttntttnaaaa

SEQ ID NO: 465 - DNA, 482 bp, Homo sapiens
  misc_feature (1)...(482): n = A,T,C or G
cctgctcgctgggcagacataccatgtggctgtggtctgctacctgaggtctcaggtcagagccacctaccatggaagtttcagtacaaagaaatctcagcccccacctccacagccagcaaggtcagcttctagttcaaccatcaatctaatggtgagcacagaaccattggctctcactgaaacagatatatgcaagttgccgaaagacgaaggaacttgcagggatttcatattaaaatggtactatgatccaaacaccaaaagctgtgcaagattctggtatggaggttgtggtggaaacgaaaacaaatttggatcacagaaagaatgtgaaaaggtttgcgctcctgtgctcgccaaacccggantcatcagtgtgatgggaacctaacgtgggtggacctcggccgcgaacacnctaaggcgaattccagcacacttggcggccgtacttagtgggatccaacttcggnaccaac

SEQ ID NO: 466 - DNA, 192 bp, Homo sapiens
  misc_feature (1)...(192): n = A,T,C or G
ctgcttgggaggctgaggcaggagaatcacttgaaccctggaggtggcggttgcagtgagcacagatcatgccactgcactccagcctgggcaacaaaacgagacttcgtctcaaaaaaaaaaaaaaaaaaaaaanaccctcgattttggcccttggggggggttnccccanttttttttggggggccatgg

SEQ ID NO: 467 - DNA, 484 bp, Homo sapiens
  misc_feature (1)...(484): n = A,T,C or G
cctgctcgctgggcaagacataccatgtggctgtggtctgctacctgaggtctcaggtcagagccacctaccatggaagtttcagtacaaagaaatctcagcccccacctccacagccagcaaggtcagcttctagttcaaccatcaatctaatggtgagcacagaaccattggctctcactgaaacagatatatgcaagttgccgaaagacgaaagaacttgcagggatttcatattaaaatggtactatgatccaaacaccaaaagctgtgcaagattctggtatggaggttgtggtggaaacgaaaacaaatttggtccagaaagaatgtgaaaaggttgcgctctgtgttgccaacccggatcntaatgtgatgggacctaacgtggtggactcggcgcaacacctaaggcaattcacncctgcnggcgtctanggatccactcgnncaacttgcgaatatggctantgttcntagnnnc

SEQ ID NO: 468 - DNA, 488 bp, Homo sapiens
  misc_feature (1)...(488): n = A,T,C or G
agaattccccttcgagcggccgccgngcaggtaaaggaaacacaacctatttgtgggagcttcttttagatctacttcaagataaaaatacttgtcccaggtatattaaatggactcagagagaaaaaggcatattcaagctggtggattcaaaggctgtctctaagctttggggaaagcataagaacaaaccagacatgaactatgaaaccatgggacgagctttgagatactactaccaaaggggaattcttgcaaaggttgaaggacagaggcttgtatatcagttcaaggatatgccgaaaaacatagtggcatagatgatgacaaaagtgaacctgtatgaagattagcaggactctgtgaaaatcttngaacgagtgcctgctgcnaaagctctgaacacatcttgtcnagggaaaatctnccttactgtcaacanaaagggnntgatggattctcctggccagtttcagtctctcctgttg

SEQ ID NO: 469 - DNA, 468 bp, Homo sapiens
  misc_feature (1)...(468): n = A,T,C or G
tgcagaattcgccctttcgagcggcccgcccgggcagagtccattaaagtgctggaaattttcttaatcatgataacatttgttaaaaagaaatcagaactaatatcaggaacatggcggcatgaaggaaacagttcccttacaaaacacagaaaatggaagcccctcatgttgagggggtgggttggacaatttgcaaacagattctaatttcctctcccgtcagcaccaaactggctgggaccaccacccctgggtgaaagaaacaacactaaagaaccctaanaacacccacacaccctgactccaccacctctgggcatctgtgggcgtttgcttgtttgaacagatccagtctcaggaaagangaagacctgcctcggcccgacccnctaaggcgatnccacncctgccggccgtctagtggatcgactcgtccaacttgcgtatatggcatgctgttctgtg

SEQ ID NO: 470 - DNA, 341 bp, Homo sapiens
  misc_feature (1)...(341): n = A,T,C or G
cagaattccccttagcgtggtcgcggccgaagtctgcaattacatcattntttatctatcttctgcttttactttgtgtagggtagggatggggacttacaaatgggccaaagacacttcaacctcaaaaccaaagagaaatctctgcttgcanagatacaaagaaagtaactctccctcttatgaaaagcaaccaggaactctactccacnnatgagggcactgatggtgtgggagagctatcaagaanantcttcctacacgtggcgcgngagacngtnagaactctgaaatcacatncatngacactngctcttaccatcatnncactctnttgtatc

SEQ ID NO: 471 - DNA, 509 bp, Homo sapiens
  misc_feature (1)...(509): n = A,T,C or G
cagaattcgcccttagcagtggtcgcggccgaagtctgagcgatgatagatatcatcatgcactggtcggatatgtgccctctggaaagagatcagcctggttccccagggggatccatgtcatatgcctggtatacactttgtggttcacgtacagttcgttggggtcagaggaatctttagcagcatgggggttccgagtgcatctgacctggagacgaaactgtagagtatctatctctgtgccttcttcatctccttggttccgatactcaaaaagacggggatcagcatgaatgggaatgagccccanacggtgagcaagaatctcattctgacaatggatgatnattgtcccaggaccttctcncagccatantggnncctcacntacaaattnncganagcattgccatggtggtaatccncatgcaactcaggagtttatcctgtgtctcatcccccgaatctntcaagcgcctgtccagctntntaccgatagccggang

SEQ ID NO: 472 - DNA, 370 bp, Homo sapiens
  misc_feature (1)...(370): n = A,T,C or G
cagaattccccttcgagcngccgccgggcangtccagcaagtcaagtggtaatcaaaactctgctagagccagaacgaaactccctcataatcacgtctcgttccttttggtccatatctccatgcatggcggatacagtgaaatctcgagcatgcatcttctcggtgagccagtccaccttcctccgggtgttgatgaagatgactgcctgggtgatggtcagggtttcatacaagtcacatagtgtgtccagcttccactcctctcgttccacgttgatgtagaactggcggataccctccaaggtcaactcttccttcttgacaagaatccgaatggggccctcatgaacttcttgncacctcaagc

SEQ ID NO: 473 - DNA, 80 bp, Homo sapiens
  misc_feature (1)...(80): n = A,T,C or G
cagaattcgccttagcgtggtcgcngccgaagtcaagcttttttntttcnttttncttcccaaaannntttttttttttt

SEQ ID NO: 474 - DNA, 512 bp, Homo sapiens
  misc_feature (1)...(512): n = A,T,C or G
gcagaattcgcccttagcagtggtcgcggccgagagtctgacctgactttgctttaagtcattcttttttatgccagcactgtttgaaagtgcatgtcaagcggctagctccacatttggtcttcgaaagggaaacgcatgcagttaaaacgtaatgtacatgatggaattgggaggatcatagtctcagtttccccccccctttctcccatctaggagacctccatggactgcagcaaaattaaaaataaagcacagacaacagaattattcttcactgagagagtttaatatgcgtttctaacaccatctatacttgctttgttgttcttgaagcatcaacacacattctggtattccagactaaagctcttgtggtgctactcngtttaanagatnaancatactancttncgtttcagnagtttntnttaattttccctactcttagtcagggactcagaaggatcagcgctggataaccatagaagtccagtttaggaaaagccacg

SEQ ID NO: 475 - DNA, 61 bp, Homo sapiens
  misc_feature (1)...(61): n = A,T,C or G
gcaaaaattcgcccttaaagagagtngngggcncgcnaacacaangcangncgcgccccac

SEQ ID NO: 476 - DNA, 441 bp, Homo sapiens
  misc_feature (1)...(441): n = A,T,C or G
gcagaattcgcccttagcagtggtcgcggccgaagtaaacttcagctcagtttcttaaccaagaaccacgtcaaccctccagggttgtggtttgtatttttgcctttaagcattatctcctttccaccaagaagcctacttaggtttaacacatgaaggcagtgtctaaaaattagatcggtcctaaattggaatgggatgtcttccttgcatgtcccataccagggaatttttttaacacacagtgtagagcctttgccagagatgttgaaagggagattaaaggcttgagggatgaatttgatcatcattcttaaagtccttcaatcctgtgatnctctgattccctgagtctcgttattttggacatgcctagccagtaccagngaccngccgcttttggtggnttccttgatacggagagctatacacatgccttgt

SEQ ID NO: 477 - DNA, 470 bp, Homo sapiens
  misc_feature (1)...(470): n = A,T,C or G
gggtaaagccatttacataatatangaaagatatgcatatatctagaaggtatgtggcatttatttggataaaattctcaattcagagaaatcatctgatgtttctatagtcactttgccagctcaaaagaaaacaataccctatgtagttgtggaagtttatgctaatattgtgtaactgatattaaacctaaatgttctgctaccctgttggtataaagatattttgagcagactgtaacaagaaaaaaaaaatcatgcattcttagcaaaattgcctagtatgttaatttgctcaaaatacaatggtngattttatgcncttgncgctataacatccctntttcatgnngatncaatantgagtantntagaacctcttntaggaattatagtngcncagaanancttgtttcttgncatggncaanttnatctttgccttggggggacgccacngnnggtcggccg

SEQ ID NO: 478 - DNA, 123 bp, Homo sapiens
  misc_feature (1)...(123): n = A,T,C or G
tggaggtnggtgcctgtgaagtccatccgtnntctcccantcctcttgatcatnatgacatttgttcncaaagaaatcanaactttcgncatntccggngggcgcnngaatganacanctctc

SEQ ID NO: 479 - DNA, 63 bp, Homo sapiens
  misc_feature (1)...(63): n = A,T,C or G
ggtcaccngttcaccaggccgtgtggccnccctctcacgatntgntganttncggaccatttg

SEQ ID NO: 480 - DNA, 465 bp, Homo sapiens
  misc_feature (1)...(465): n = A,T,C or G
aaatcatacggacaaacaactttcaaacaaaactggattagtaggatttcttgcctgcttaactaacatgacagacttcttgtcccaagcccttctcagaaaaacctcatgtggaaaccaagctagagataagaattcttccctgatgcagttaggggaaagggaaaggctagaaacttctttggcaagcaattccacacacagccatttatgtgtgagtgctctgcttcaagcacagtacactctttgcagggacggccagatgttcagagtgggagtggtcttttcaaccagctaaaagtgcagaagtcatctagtngntgctnttccactgccntgctgcagcttnagaactttaacacccttggctgaatttgagtaaancagntgactggtgcntggggctcntgaaaggaatggngggtggaccgnaaccccanctgatacctnaagattngggaagag

SEQ ID NO: 481 - DNA, 449 bp, Homo sapiens
  misc_feature (1)...(449): n = A,T,C or G
aaaatttagattagcacaccttactaatctgacagaacctggattctcttgatattggaagaagatgagagtggataccggggaagtcactagaagtatctgtcactcttggctggacagcaggctgcaaacatattaccacttgatggaggcatcatgctctggtcgcaatccgtgtgcatcaggtaccagtaacaaagtggtactgagaaatatcctcatgtcacatagatctcaatatgccattggtcaaggaggttgtncagaaaganattaggacgttatcaaggatgaactatagtaaaaatctattaacaacctttcttgataagntnaanggtatttaaangaggtaacntnaaataagatgaaaattntgaccggggttnttcttntgagaganactgnagcaccnnccggngccgtcnaangggatccacccctgctgc

SEQ ID NO: 482 - DNA, 401 bp, Homo sapiens
  misc_feature (1)...(401): n = A,T,C or G
atctcttcttcctcaagagtcaagctnggctcccttcttgcggcccaagggcagcgcatagtgggactcgtaccactgtcggtacggtgtgctgtcgatgagcacgatgcaattcttcaccagggtcttggtacgaaccagctcgttattagatgcattgtagacaacatcgatgatccttgttttacgagtacaacactctgagccccaggagaaattccccacgtccaacctcagggcacggtatttcttgttacctccccgcacacngactgtgtggatgcggcgggggcaatcttggtgttggcaacctcngccnnaacacgcttagggcnattccacacactggcggccgtactatggatcnactcggnccaacttgcgtaatatggcatactgtt

SEQ ID NO: 483 - DNA, 230 bp, Homo sapiens
  misc_feature (1)...(230): n = A,T,C or G
ctgagctcgcctgnaccacaagtttgacctgatgtatgcaaagcgtgcctttgttcactggtacgtgggtgaggggatggaggaaggcgagttttcagaggcccgtgaggacatggctgcccttgagaaagattatnagagaggttggagcagatagtgctgacnngagaggatgagggtgaagagtttaacctgtgcgctgncttttacactnctntgtttggaactgt

SEQ ID NO: 484 - DNA, 498 bp, Homo sapiens
  misc_feature (1)...(498): n = A,T,C or G
gcagaattcgccctttcgagcggcccgcccgggcangtaaaaggatttttatctttcgtgataaactttgctgtgtaccaggaactataaaaacaaaaacttgttactaaagaaaatatctgaaatgtgataagttcttatgccatgttaatttcatgtgtcaacttcaacatttacatgtattatttcattatgtaaaatgttttagcaatttaatattttgcacagttagcaaactttgtatgtcatttccttcaaggcatcatgcagagttgacatgagatttataaggntttaagttgtttgcatgtgaaaatcaaatacatactttggtagctttgaatacaaagcatctgctcttggtttcaagaattttgagacacaaagtggatgtaangaatatattaattgccgnntctaggagattgctcaaaagagnaatcacttatntgtcaatgatantggaactgggaattctttgtgcangttggagtcatt

SEQ ID NO: 485 - DNA, 491 bp, Homo sapiens
  misc_feature (1)...(491): n = A,T,C or G
gcagaattccccttagcgtggtcgcggcccgaagtccattgtctgtgaagtagagggaatcacggagagaggagccaagggggaagccagtcgccggcttgaagagtggggaggtgaagtccacggtcctcctgacgaactccaggtccccggcgcctgccccataggggaagagggaaactcctctctcangcaggatggggatgggggcaggtgaggcgctcacagcctcgcgaaggtggagaagggcaggggcaggagangctgcggaggangggcacggtgcancangccgtggggactgcatgcactctcctggtgtcacatgcccacagcacctcgtgacnaagcacngacccaaaagnggggtgtcgtgctntgcccngatttactcnttgtcaaacccggtaccntccaatctntggctgctggccctgccttttcnntttcatggtggncggccctgcttccancttccttttctttcatgg

SEQ ID NO: 486 - DNA, 518 bp, Homo sapiens
  misc_feature (1)...(518): n = A,T,C or G
gcagaattcgcccttagcggcncgcccgggcangtgggatcgcaaggctgaggatgccanagagggactatgaaaaagccatgaaagaatatgaaggggaccgaggcgagtcttctaagagggacaagtcaaagaagaagaagaaagtaaaggtaaagatggaaaagaaatccacgccctctaggggctcatcatccaagtcgtcctcaaagcagctaagcgagagcttcaagagcaaagagtttgtgtctagtgatgagagctcttcgggagagaacaagagcaaaaagaagaggaggaggagcgaggactctgaagaagaaaactaccagtactcccacagctcanaagactcancgtcaggatccgatgagtagaacggangaaggtctctttcgcttgcctttnacccccccgctcccnccatttttggtccagttctctcntnaatgcatcctggttctggcctctgacatctctctgtggtgtgntgcctaggcagggggaacnctacttnt

SEQ ID NO: 487 - DNA, 519 bp, Homo sapiens
  misc_feature (1)...(519): n = A,T,C or G
tgcagaattcgcccttagccgtggtcgcggcccgaagctgagagaggtgctttcattgatcaaagccaatctttgaacatccacattgctgagcctaactatggcaaactcactagtatgcacttctacggctggaagcagggtttgaagactgggatgtattatttaaggacaagaccagcggctaatccaatccagttcactctaaataaggagaagctaaaagataaagaaaaggtatcaaaagaggaagaagagaaggagaggaacacagcagccatggtgtgctctttggagaatagagatgaatgtctgatgtgtggatcctgangaaagacttggaagaaccagcatgtcttcagtagccaactacttcttgagcatanataggatagtgggttgnttgaggnggtaagntttgctggccctgttnaggcaaangagaattgattacctgccggcggccgtcaaggcgaatccaccactggcgccgtctatggtccactcgtccaactgcnt

SEQ ID NO: 488 - DNA, 502 bp, Homo sapiens
  misc_feature (1)...(502): n = A,T,C or G
gcagaattcgcccttagcagtggtcgcggccgaagtaaaatactttatttagccaaatggtttcttgaatcttagctacagagaaatttttacattaaagaacatcatgattatcacaacaacttacttagcacttgcgtgtactaagtgctgcactaagacattgtagtttccagtgtcttgaaccaacctgggaaaaatatcagtggtgagggttcagtgtttgtatatggaggatggtgcaaactgaattattcccataaagctgcttggtaattccagagaaagcacacagccaccttctcattanaaggagggtagggataggtgttatggtgaaaaactgagatgctgtggatcnagggcagaagacctaaagaaatctctntccttntgagcnnccntgtggaggactcgacctctncnatgggnctgggaggacatcaggccatttcttcgatgatntngancccagaggagcncttggagcnggtaataattg

SEQ ID NO: 489 - DNA, 507 bp, Homo sapiens
  misc_feature (1)...(507): n = A,T,C or G
gcagaattcgccctttcgagcggcccgcccgggcaggtaaaggaaacacaacctatttgtgggagtttcttttagatctacttcaagataaaaatacttgtcccaggtatattaaatggactcagagagaaaaaggcatattcaagctggtggattcaaaggctgtctctaagctttggggaaagcataagaacaaaccagacatgaactatgaaaccatgggacgagctttgagatactactaccaaaggggaattcttgcaaaggttgaaggacagaggcttgtatatcagttcaaggatatgccgaaaaacatagtggcatagatgatgacaaaagtgaacctgtntgaagattagcaggactactgatgaaaaatcntagaacaatgcctgctgcagaaagctctgaaacacatctctgtccagnggaaaaatctncctatactgtcngacagagaaggngantagagtgtgatntccttcctggccgatnttatcagctcnn

SEQ ID NO: 490 - DNA, 480 bp, Homo sapiens
  misc_feature (1)...(480): n = A,T,C or G
ccaattatgcccctgcaaagaacaggaagaagactgctgcaggcagggcatcagtggtttttgtggacagaaccctggatctcacaggagcagttggacatcatggagacaacttagtagagaagatcatttcagcacttcccagctcccaggccacacaaatgatgtgatggttaacatgatagcgctcactgcactccatactgaggaggaaaattataatgtggttgcaccaggctgtctttcacaatccagtgacaccacagccaaagccctatgggaagctttctgaacactaagcacaaagaagcagtgatggaagttcggaacatctantggaagcggcagcagagaaacctgccatcagatgagtatgggagagtncaccggacagctntgtccttnttcactcttnanacacctaaactctatgaatatngtggctctcacttgactggactgccggngcntaaggcantt

SEQ ID NO: 491 - DNA, 476 bp, Homo sapiens
  misc_feature (1)...(476): n = A,T,C or G
agttgtcataatgcaaattttattttgattagtttttgtgactcctttatcttaaacccagcgatgcttgccacttcccaaggtgtaaaaatgtgaagattaaggtaaactgaatgtcgaggagtgtaaagagatggcaaaacacagataaaaacatccaaaaagcctctgggggcaggtcaagcttatgattcaacagttagaaaaccaaaattacttggacatccccttctacttaaagtgatatactggaattgaaaatattaactgttagttttagaaactaagattcttgaagtangctcattccagaatgctttcttttttcttcctgaacaattacatcaacttagatatcctaatgttattttagatatactccttaaagcattatgtcaccctttcgagatgagaaattacntactaatnacttacattgtcttagactggtttgtagataggnncaagnctagnng

SEQ ID NO: 492 - DNA, 481 bp, Homo sapiens
  misc_feature (1)...(481): n = A,T,C or G
gtggagggagaatcacgacatcattcataaataactgtggagtctgggatgctggctgaaggcatctccaggaaggactggagggcgattttgctaaagggctgctcactgctcatttcactgcatgccgcttttctcactttggttgggagtttgaaggaccatgtaatcacagagattagagctccctgtgaaatcaatcactgcctttagatctccacaaagacctgttctccaatagcacatgcgtttctctgtgagctgtattcgcatcagcgccggacctcagaaagaatgcgtgttacactctgtactctccaatgggnatatttatcatagaaatctaatacatattcttcagtcttgaatccaacttctggacagtacatagcngggtgcttntgaacgtgaaaggtacgtcttgccttcaggctgccaagatgganaatcnngataaatggaaggactcggcccacnccct

SEQ ID NO: 493 - DNA, 468 bp, Homo sapiens
  misc_feature (1)...(468): n = A,T,C or G
cgaagtctgtttacagaaatatagttgcgaagtatacaaatgttccaatagaagcaaaatatctttttaatatttaacaagttatcacagatagctaaaaacatagatgcaaatgaaattcccccagagaacaaactgaaaatatctggtatcagtgctctgaaatcccaactatgaaagccatatacacaaaaatgtaacccttatatcattgcaggacaatggaagaaggcagttcagtggttgatcagtgtgctcaagcaaataaaattaaataaaaattaaaaatggcagaatggtagctaacccttgagaacagggtaatgaaattattggtctatacttaaacattaagtaaaagaaggaatgaactcattactgcccggcggccgtcgaaanggcaattcacacactgccggcgtctagtggtcgactcgtccacttgggnatatggcatantgttctgtg

SEQ ID NO: 494 - DNA, 481 bp, Homo sapiens
  misc_feature (1)...(481): n = A,T,C or G
tgcagaattcgccctttcgagcggcncgcccgggcangngtcacctcttctaatcttttaatgtatttgtttgcaattntggggtaagactttntntatgagtactntttctttgaagttttagcggtcaattnngcctttttaatgaacatgtgaagttatactgtggctatgcaacagctctcacctacgcgagtcttactttgagttagtgccataatagaccactgtatgtttacttctcaccatttgagttgccatcttgtttcacactagtcacattcttgtttaagtgcctntagttttaacagntcactttttacagantatttactgaagnatttattaaatatgcctaaaatcttaaaccnnaaaaaaaaaangaaaatantcnctaaaaaacctnngcgganccctangggnaatccaccctggcggcggtctaggnnccnaccggccaactggngatcnggcntctggt

SEQ ID NO: 495 - DNA, 476 bp, Homo sapiens
  misc_feature (1)...(476): n = A,T,C or G
tacattgtacagggctaggcaaccctgttcttcccagacagccatattaaatgaaagccactaaagtgaactcttaattacataaaacatatccattatctgattgccctttaggaagtatactgaagatgcaagtttttttcatctggagttctgcctgaccaagaattaagcctataaatctatcttgccattcaagcagagagcactggacaaactgaagcacaaaaacaaataagcaaaacttatacaaacagcatgggggttgggggtgagggacttaaaagtagacatgctacacctaatgcaagaacagcttggnttctttgccagatatccttgtgacacatggattgagatcaatggnctcacanggatctaaaatgcatgttntgatatgactaaagagcctctggatggactcggcgcnaccgctaaggcgaatccaccactggcggcgtctatgggatcgacnn

SEQ ID NO: 496 - DNA, 478 bp, Homo sapiens
  misc_feature (1)...(478): n = A,T,C or G
ctgaaagaagcccaagtacacgtatcctctccagacatttgcaattggcatggaagacagccccgatttactggctgctagaaaggtggcagatcatattggaagtgaacattatgaagtcctttttaactctgaggaaggcattcaggctctggatgaagtcatattttccttggaaacttatgacattcaacagttcgtgcttcagtaggtatgtatttaatttccaagtatattcggaagaacacagatagcgtggtgatcttctctggagaangatcagatgaacttacgcaggggtacatatattttcacaaggctccttctcctgaaaaaccgagangagagtgagangttctgagggaactctatttgtttgatgtcttcgcgcagatcgactctgtgccatggcttgactgagagccattctagacatcatntcttctntctgctctgcncngantgaaatncanaatgg

SEQ ID NO: 497 - DNA, 399 bp, Homo sapiens
  misc_feature (1)...(399): n = A,T,C or G
cctggtcacctctgtagcctactcttatgacacatgggtggaggcaagggtaaccagagtccttgttctttcttttgattggggtcatccagcccttccgatgtgtggtcagggagcagagtcactgataggatgttgagacttggagatcaggaccagacttttccccattcttgcatctggcctgtgcttgggcaggacctcnggtgaaggatgatcttggaatcacccttttgtcagccccangaaagantggctggagtggcttctacaaacttctctcattactttncctcatggaactaagccttatgtcatgttntagaacacganactgaactncanagagtgctcanagacaccaggacacctggcttcttctttgntgnataaatgcac

SEQ ID NO: 498 - DNA, 471 bp, Homo sapiens
  misc_feature (1)...(471): n = A,T,C or G
ccaaagcagccagggaagagtgccctgtgtttacaccgcccggaggagagacgctggaccangtgaaaatgcgtggaatagacttttttgaatttctttgtcaactaatcctgaaagaagcagatcaaaaagaacagttttcccaaggatctccaagcaactgtctggaaacttctttggcagagatatttcctttaggaaaaaatcacagctctaaagttaattcagacagcggtattccaggattagcagccagtgtcttagttgtgagtcacggtgcttacatgagaagtctgttgattattttctgctgncttaagtgtccttccaccactctgagcagatctgacttatgtnagtcactcccatacagggatgagctcttatcntnactttgngaagaagaaagtaaccacggtcatgttttgttgacctcaggactctaatggctgctgactcctaggtaattnt

SEQ ID NO: 499 - DNA, 65 bp, Homo sapiens
  misc_feature (1)...(65): n = A,T,C or G
ccccntaanngagtnaggttcnattcaccagagcngtncgctccccctctatcatgcatntatca

SEQ ID NO: 500 - DNA, 343 bp, Homo sapiens
  misc_feature (1)...(343): n = A,T,C or G
cctacccattctcctagtttcttgttgtcatcaaccttaattaggttgatttggtgttcagcacaaaaggcctccaccaacttgacatacataggctcatcacagttggatgcaagcacacaaagatgggctnggcgccttttcctaagtttccggtangacggatgccattcagaactttngcgctaacaccatgaactccatgccttcttccttgggtggcangttntgttccggntgcaagaacccacagtattganactgatacacttacttgtctaaagctnnggcagcttcgngaattcacgngctangccatcttggtgaaggcagtcttacaacc

SEQ ID NO: 501 - DNA, 464 bp, Homo sapiens
  misc_feature (1)...(464): n = A,T,C or G
tgcgagaatgaagactattctcagcaatcagactgtcgacattccagaanatgtcgacattactctgaagggacgcacagttatcgtgaagggccccagaggaaccctgcggagggacttcaatcacatcaatgtagaactcagccttcttggaaagaaaaaaaagaggctccgggttgacaaatggtggggtaacagaaaggaactggctaccgttcggactatttgtagtcatgtacagaacatgatcaaggggttacactgggcttccgttcaagatgagnctgtgtatgctccttcccatcacgtgtatncangagaatgggctcttgttgaatccaaattcttggtgaaaattatcccagggtcggtgagacaagngtnttgtcanatctcacccaaaagataataatcttgaagaatgcattgacttgttcaattacgntttgatcacaacncacatn

SEQ ID NO: 502 - DNA, 427 bp, Homo sapiens
  misc_feature (1)...(427): n = A,T,C or G
ctggcctttctagtcaagaagactaaggtcaatatggaagtagacataaggaaaatagtcttggttattgagttgcagtcccgggatctccacagatgcatccagtatacttgtagcggctacttcatccagatgtcggaagacagagtttagaacctctcttaaacgcttggtggatgacttcttatgcggctgcaggagcactgctggaagttcactggtagtccatacctgagcacggactccacaaacactctcaaggcttgatgtggatccangcaatgaangcttcactgaagttcaccttgaccagcgcacanggggcctcaccctcnacctcggccgnaacacgctaanggcgaattcacacactgcggccgttctagtggatcgactcgtccaacttggcgtaatctggcatantgtt

SEQ ID NO: 503 - DNA, 346 bp, Homo sapiens
  misc_feature (1)...(346): n = A,T,C or G
gtcctgttctgggagatggtcatattcacctgccaaaatctgctggaatcctttgatggtctccttcaggggtaccagcttccccatatgacctgtgaagacctcagcaacctggaatggttgagacaagaaacgctgtattttccgtgcacgggacacggtcaacttgtcttcctcagaaagttcatccatacccaggatggcaatgatatcctggagggatttgtagtcctgcaagatcttttgcaccccacgggcaacatcgtaatgctcactgccaacaatgttgggatccatgatacgagaggtggagtctagangatccacagactcggccgcgacacgc

SEQ ID NO: 504 - DNA, 77 bp, Homo sapiens
  misc_feature (1)...(77): n = A,T,C or G
gtccgttaaacnntcacgagcgatccccataacnctgatgtcgagngnagaggataaatatngaganccangtcaca

SEQ ID NO: 505 - DNA, 430 bp, Homo sapiens
  misc_feature (1)...(430): n = A,T,C or G
ccattaaagtgctggaaattttcttaatcatgataacatttgttaaaaagaaatcagaactaatatcaggaacatggcggcatgaaggaaacagttcccttacaaaacacagaaaatggaagcccctcatgttgagggggtgggttggacaatttgcaaacagattctaatttcctctcaccgtcagcaccaaactggctgggaccaccacccctgggtgaaagaaacaacactaaagaaccctaaaaacacccacacaccctgactaccaccacctctgggcatctgtgggcgtttgctgttgaacagatccagctcngaaagaagaagactgcctcggccgcacccnctaanggcgaattcacacactggcggncgttctatgatccgnctcgnccaacttgcgnaatctggctactgttctgtgcgg

SEQ ID NO: 506 - DNA, 508 bp, Homo sapiens
  misc_feature (1)...(508): n = A,T,C or G
tgcagaattcgccctaggggngtcgcggccgaggttttttttataaaactnttattattctagcaataataatgtgtgttaattttaggaatatagaaaatacaaacaagcaaaaggagaaaaatcattcataatcccaccaccgagaggctgtactttctttcatccttcacaagttatgtccatatatgtaatatacaaatgtctttttacctttcaaaaatatgatattcacatattacttagcctttttccattttatatcttaccaagaacctcttttttacaaatgtgtaaagttcttttattaaaagacagagacttgtagattggncanaatacaatnaacaatgagatgcagatacaagagatcatctaaaccattaatagcacnnggtataagtngaattggccaaggatatcaggaatgctataaaagcaactattggattgtattcgataaatcaggaactcataatagggnaggtggtcntanctcacnatcctt

SEQ ID NO: 507 - DNA, 477 bp, Homo sapiens
  misc_feature (1)...(477): n = A,T,C or G
aaatcctccttgtcctaattggctatgttcctaacttgttttctatcactacagtgaatgctgcaatactgatataagaaaaaataaaataaaatagtaacctctgcttcaatgtacagtttccagaatctgccagaactggggaactgggcaacaaggcgttcataagtcttccgtgctttgtctataggttgattctaaaattgaaaaccaataaacagcatttacaatgttaggattatgaaaatattattcactgcagaaccaagtagtgtgattggacccatagagaangaaatgtaatctattcactaaacctgtgcctctcgaatgagatgctcaagcatcaaggcatatggatctctctaattctttccgtttcttcaccttctctgggacatactcagactgccgggcggncgtcnaaggngaatccacacctgcgggcgtctagngatccactcgnncaactggcgn

SEQ ID NO: 508 - DNA, 172 bp, Homo sapiens
  misc_feature (1)...(172): n = A,T,C or G
ccccccnaaanaaagnangttacaanttcaccagagccgtctgttgccccttccggctatncatctcnatatctctagatacccntaatantnagtntaattncccatanattgnaatncggtanatatatntcnaaatancgnnacaattgcnctaaattctangatatca

SEQ ID NO: 509 - DNA, 457 bp, Homo sapiens
  misc_feature (1)...(457): n = A,T,C or G
ctgtttacagaaatatagttgcgagtatacaaatgttccaatagaagcaaaatatctttttaatatttaacaagttatcacagatagctaaaaacatagatgcaaatgaaattcccccagagaacaaactgaaaatatctggtatcagtgctctgaaatcccaactatgaaagccatatacacaaaaatgtaacccttatatcattgcaggacaatggaagaaggcagttcagtggttgatcagtgtgctcaagcaaataaaattaaataaaaattaaaaatggcagaatggtagctaacccttgagaacangntaatgaaatattggtctatncttaaacattaagtaaaagaagtgaatgaactcattactgccgggcggccgtcgaaaggcaattcacacactgccgccgtctagtgatcgactcgtccaacttggcnatctggctantgtttc

SEQ ID NO: 510 - DNA, 470 bp, Homo sapiens
  misc_feature (1)...(470): n = A,T,C or G
tcctgattttttgtcttattccaactaagtagatcattatctctttccttttttatgttaatgagagaatttagcctccactcaacaatgttcaattcagcaaggctttcatatccttgctgtgggtcgtggataaggagcttattcaggtttcctgccctagctattagctccacttcacatgctggagaccggcgtagggacagatgtattcatcctggngttactgaaaaacaggtgtgatcctgttactgatactataagtgacctaaaatgcactgttcaaattagccagngtctaacaaactaaactcttcaaatgcttggaaagatctacaaagcaatcttatagaatgggccaaataaactatgtgtttgcatggtattgtaactccaangtcctggttctgccgtgtctggagtgcncctgctgggcaagntcttggctggtgagactgtgnctttcccta

SEQ ID NO: 511 - DNA, 513 bp, Homo sapiens
  misc_feature (1)...(513): n = A,T,C or G
tgcagaattcgcccttaagagagtcgcggcccgaagngtccggtcnctgaaaggatttatgtttntcttcgttagataagtgacttctgagcaagctgatctcccctggcatgctccaacctgattggacaaaggaagctctatggcctgggagagagactattcttaatttttctttcttacaaaaactgatttttcccataaatatttttacttcagaggactaggaccattttgttttgggcccttctgctgaaaatttgctcgtttaagaggcagctagaatctttaccatatgtatgaatttgtataattcatttttggatagggataaacttttgcttctgataaaagctggaattcatctggcctcacagcatgcgtgtgggncttnctgagcccgaanaggtttggnaagatctgggatggcagtgttagctttctganaganacatacagaactgtcatcttaagacctctcntggatctctttcagagatgcagtggntgagg

SEQ ID NO: 512 - DNA, 301 bp, Homo sapiens
  misc_feature (1)...(301): n = A,T,C or G
tgcagaattccccttcgagcggccgccgggcangtgaacgtgtgatcaccattatgcagaatccacgccagtacaagatcccagactggttcttgaacagacagaaggatgtaaaggatggaaaatacagccaggtcctagccaatggtctggacaacaagctccgtgaagacctggagcgactgaagaagattcgggcccatagagggctgcgtcacttctggggccttcgtgtccgaggccagcacaccaagaccactggccgccgtggccgcaccgtgggtgtgtccaagaagaaata

SEQ ID NO: 513 - DNA, 358 bp, Homo sapiens
  misc_feature (1)...(358): n = A,T,C or G
aaaaaaggtgcgggccantgcaggggacactgaaggatttgaggcangaaaactccgcgataagagctgtctatatggccctgtggcagaagcacgggggacacgaccccatggaactgtgtccattaaacctctttgtcttcataaattacccantctcgggtatttctttattagcagcgtgagaacagactaatacagtaaattggtaatggtatagagtggggtgctgctataaggatacctcaaaatgnggaagcanattttgaactgggtaacaggcaaaggctggaacagtttggagggctcaaaaanaanacagggaagacntnggaaanttttggaacnttcttnaaaa

SEQ ID NO: 514 - DNA, 519 bp, Homo sapiens
  misc_feature (1)...(519): n = A,T,C or G
aaataatttcttaatttatatgaaataaagacaacccatatagtagacttacaaatattctatttcgcattatattcaagactaaacatcttccaaaccatattcatgaaatggtttgatgatatgtgctttggcggttttcaagaaatatcaatcaaaccgtaattaaatttcaacgtatcggctaaacatccactgagcacctcctcttgcagttagcattagactaagtgcttaaggacaagtagtttgatgcaataaattaggaaatacatatttaagacttatattattcacagaattcttggcatagttatttaagttccttctgttgagaaccttgagggttggggtttctttnttcagtcccaaagctccgttttgagtctcccccttggngaattnaggtttgnaggccggcggangncctgtcncctttgccctgncaatggcctcggcgnaccctaggcaatcagnctgcgcgtctgngaccactcgnccactgcgatatgctgtgtt

SEQ ID NO: 515 - DNA, 393 bp, Homo sapiens
  misc_feature (1)...(393): n = A,T,C or G
aaagatcaacttttattgtaacaaatataaagtcatcaatgttttacaaattgtcaaaaatgctttaagtacaaaaaatacattagtaaaatgaaagttatgttgtattatttggtatacacttaatactgccaacatgcataacacatgccagaaaagctcatgcattattggaagagaaaagaaatgtgatgtaactgctatattgtctgattataaattcattgcttcagtcagttttctttcttcagggataccatttacctgcaatgtgtaagaatgaatatgggcaggagttagtcagggcatggatacttttagattttgagccaagcaaattattgcaaggagaaaagttccnntttcntaattccanggaaaataatacattgc

SEQ ID NO: 516 - DNA, 396 bp, Homo sapiens
  misc_feature (1)...(396): n = A,T,C or G
ccagagtaagtcctgtaaacacagaattaaattaggggactcaagcaactattattatatttctcctttttgcagatacaggatcacttctgtatgtaacttttttacatacattcgatacattcagcagggactcgtgaaacagcaggatgttgatcagatgttttgggaggttatgcagttgagaaaagagatgtcattggcaaagctgggttatttcaaagaggaactctgatgctctgcgtgggaccatgcctgaactccccgaataactgaaaaatggctgaatatttttatggttacttgatatttatttccaaggagtgagcctaagacttttttccccttttgcaaattgctctaagaaagncccataattcttttacttcccgggcg

SEQ ID NO: 517 - DNA, 522 bp, Homo sapiens
  misc_feature (1)...(522): n = A,T,C or G
aaataatccaggcaggagaagagaggagggcacacttggaactcccctccccacaatacgtgattatttacattttagtaattggacaatcccggctcaggaggaggttgcaagaatctgcaaaagttggagggagcgccccaggagaacaaacagcaagccttatttcccctagcccatcccccaaaaaaccatccatcccatcctagtgtctggtggtgtccggtggtgtccatcttccattccttcccaaattatggaagtaaggttcttctcaccagaataagagcacttgggataacagagtanggtcccctcacccaaaaaaaaaaaaaaaaanctttgggggaanaaaaangggttttccttcccccnaaaaaaaaaaaaatnggggtttgggggggggaaanccnntttccccccattttgggccccctngntttnggggaaanggggccccttttccaaaaaaaaaaaaacttttngggggnttttggggangggaaaacccccnttcccccc

SEQ ID NO: 518 - DNA, 431 bp, Homo sapiens
  misc_feature (1)...(431): n = A,T,C or G
aaagctaattagtacattttatatatcataaaaatatttttagtatattttcatgaaaatgctatagacttttgcctattgcccaacaaagtagctaataattcttatatttttgtttcagcctattcttcggaacagcactttagtagcttcttaaagttatattcaaagttgaaactgcagccataaatatttccaagagccacattcttccaaccagacagctaattactacagtcattatctgggcatatgtacccacagttgatgctttgctgttgctgctgctgctgctgccactgctagagacagactctgccagcaggctgaaagttctggattctaccccaaccacattatncagnataaaatcaatcttattaatttttcctgtctaanggggagtaagnctggngaagttggcccaacag

SEQ ID NO: 519 - DNA, 572 bp, Homo sapiens
  misc_feature (1)...(572): n = A,T,C or G
ctggagaccttcaaagctgtgcttgatggacttgatgtgctccttgcccaggaggttcgccccaggaggtggaaacttcaagtgctggatttacggaagaactctcatcaggacttctggactgtatggtctggaaacagggccagtctgtactcatttccagagccagaagcagctcagcccatgacaaagaagcgaaaagtagatggtttgagcacagaggcagagcagcccttcattccagtagaggtgctcgtagacctgttcctcaaggaaggtgcctgtgatgaattgttctcctacctcattgagaaagtgaagcgaaagaaaaatgtctacccctgtgcttgtaaagaaacttgaaaaattttgccattgccattgcaggatttcaaanaatgaatccttgaaaaatgggtgccanaacctgncccgggccgggccgnttcaaaggggcgaaatttccagcccacttgggccggcccgtttacttangngggaatncccaanctttgggtnacccaancctttgggccgtnaattcattgggncattaancttggtttnccctt

SEQ ID NO: 520 - DNA, 404 bp, Homo sapiens
  misc_feature (1)...(404): n = A,T,C or G
gccctgggtatgattgggctctctcagcgcttgctgtccgtgttgtcctttggcaagagaggacggtcctaggattgcatcagtctggtggtctggtggagcgggtggggtgctggactgggtagagggcccagggttctgacctgggtggatgatgggtgaatggtcctgaactctctgctccctctntcagtgtctcttgggcttctatggagcttccctcttgtgctggaaacctcttttccatcttggaaatgcctctgcccacatntgggaagtgccatanccttgagtgaattnatttgtntatntatnaaatctttttcttctctcaggatacatcattcactttttggggacctnaaagaanctnattaactgatnaatttgtgaaactaanaant

SEQ ID NO: 521 - DNA, 555 bp, Homo sapiens
  misc_feature (1)...(555): n = A,T,C or G
cctcaccaagtcttggctgtttctagctagctctataaacttttttcagcctctgttcattacccagttccaaagctgcttctacattttcagatatttgttatcagcaaaaaccccacctcttggtaccaattttcagtcttactctgttttctgatgcatatagcagaatacttgaaactgtataatatataggaatcaaaatgtatttcctacagttacaaaggctgggaagtccaaggtggagagggcacatctggcaaaagtcttcttgctagtggggactctccactttggcagaggtggcacagggaatcagatggtgagggggaagaacatgctanctcangnctgttttctcttcttataaagcancaattccttntccaatgataatccataattcattaacccattaatnttggaagcttnttattttcctnttaaanggccctacctctcaaaactggnattattgggggaataaagtttcaccntgagtttggaggggctgaacattcaaactatagcataacacacatgcttcncccttga

SEQ ID NO: 522 - DNA, 241 bp, Homo sapiens
aaaatcctgattttggagacttaaaaccaggttaatggctaagaatgggtaacatgactcttgttggattgttattttttgtttgcaatggggaatttataagaagcatcaagtctctttcttaccaaagtcttgttaggtggtttatagttcttttggctaacaaatcattttggaaataaagattttttactacaaaaaaaaaaaaaaaaaaaaaaaaaaaaaaaaaaaaaaaaaaaaa

SEQ ID NO: 523 - DNA, 428 bp, Homo sapiens
  misc_feature (1)...(428): n = A,T,C or G
ctttgggaaagttggtatgaagcattaccacttaaagaggaaccagagcttctgcccaactgtcaaccttgacaaattgtggactttggtcagtgaacagacacgggtgaatgctgctaaaaacaagactggggctgctcccatcattgatgtggtgcgatcgggctactacaaagttctgggaaagggaaagctcccaaagcagcctgtcatcgtgaaggccaaattcttcagcagaagagctgaggagaagattaagagtgttgggggggcctgtgtcctggtggcttgaagccacatggagggagtttcattaaatgcttactacttttaccttggccgngaacccccttanggcgnaattcancacctggcggccgttctaggggatccaacttcggaccaacttgnntaacatggcatantgt

SEQ ID NO: 524 - DNA, 656 bp, Homo sapiens
  misc_feature (1)...(656): n = A,T,C or G
aaaaagacacagtgggcaataagaatttgccctatgactcctgagaaaagggacatcctaaaatggaactactgaatccaaccatgtggttacaatatattaggaatcactctgtttcaactttaagattctattaatttattcttacaacaaataaccagtgggtttattctatgggctaggtattcatttagatgctaggggtacagtagtgaacaaaacagataagcagtcctgctcttgtgaatgcatctgacaatacatttgacaattcaaatctctctctctcgctctcatatcactgacctagtatttgaaacctgatgtaactaattaacagattaactattaggtacccttctgaatgatactctaagcacacatatnctattccagaaagaaaaanggtangaaaaaagtttttgggatagcttaaaatattcctcnccccaaatagcttggggtcttcaaacagaatttctggatcaccttcaatttcccgcttttattcaaaaanggcattgtggtttaacttttttaacctttggggccgggnaaccccccttaanggggcgaaatttcccancnccacnttgggggggccggttnccttagtggggaatccccnaactttngggnnccccaaanctttgggc

SEQ ID NO: 525 - DNA, 360 bp, Homo sapiens
  misc_feature (1)...(360): n = A,T,C or G
attctctgtacgcccagggaaagcggcgttatgacaggaagcagagtggctatggtgggcaaactaagccgattttccggaaaaaggctaaaactacaaagaagattgtgctaaggcttgagtgcgttgagcccaactgcagatctaagagaatgctggctattaaaagatgcaagcattttgaactgggaggagataagaagagaaagggccaagtgatccagttctaagtgtcatcttttattatgaagacaataaaatcttgagtttatgttcagaaaaaaaaaaaaaaaaaaaaaaaaaaanntttttnccnncccgggggggcntttaanggggaaantccccccccctgggggg

SEQ ID NO: 526 - DNA, 53 bp, Homo sapiens
  misc_feature (1)...(53): n = A,T,C or G
tattacaattcactggccgtcgttttacaacgtcgtggnacctaactggctct

SEQ ID NO: 527 - DNA, 554 bp, Homo sapiens
  misc_feature (1)...(554): n = A,T,C or G
cctctgaggaagggacaaaggagctgggaccggactggctctctccgagctttgagaccaagtctcctgcacagaaggcccagcaaaggcaaagactaggaggcagcagcaccctgtgtcatccagaagtgcaggggacaaggtgtgggacgccagatggaagtgggagaggatggaagtgtgaagaccggaaaggccatcccctcctaaaactccatggacacaacaatctgaatgtgcgaacttcaggcagttctaactttgtcccagccaaaccagtcccggaacaaaacacacaatgccttgagatggaaaagactgaaacccctanaatgacttatntncgtaattttattcttcccccnactngggcttcttgnggaanaaaaaattttgcttggaaaagaaagcttaaaacnnattnccttgagggttttttacccttcggcccgngaaccaccctttaaggggcgnaatttccanccccacttgggngggccggtttccttagnngggattccgaaacttnggnncccaanccttnggcggtaaat

SEQ ID NO: 528 - DNA, 536 bp, Homo sapiens
  misc_feature (1)...(536): n = A,T,C or G
ctgagatacccctgctgctgtgtcaaggaaagggctttatttgtgaattttgccagaatacgactgtcatcttcccatttcagacagcaacatgtagaagatgttcagcgtgcagggcttgctttcacaaacagtgcttccagtcctccgagtgcccccggtgtgcgaggatcacagcgaggagaaaacttctggaaagtgtggcctctgcagcaacatgatgcccctgagtactgtgaaaaagactgttcaacatgccttatgataacaccgatttgtgtctattattggtgacattgttttagatattgggtattgtatattaaggaaaaagatggnctatattctctttattggatatacttaatggttcaaaagaatgcaaaatcttgggtttaaccccagggctgatagntgggggttttggttancaaatgttctggtttgggtgctattgggtttttaacttnggccgngaaccccctaanggcnaaattccaacacacttggcnggccgntncttagngggaatccca

SEQ ID NO: 529 - DNA, 768 bp, Homo sapiens
  misc_feature (1)...(768): n = A,T,C or G
aaaaatataacacagtcaatataaacatgtactgggaattataaaccattctttcttctaagcactggatgagatactaaaaacatacagtatcttaccaatagccattaaaataggctaaaatgaaaaagaaaccgttgtaacaaggttactaatcccccaactttcaatgctgagttccttcatcatccatgtgcaatccagagatgacatctagcagggtggtaaaattattctggaaaatgccaactgtacttagacaaaataagttaattctatatggttgtccattaaagttttatgtggctatggttccactggagctaaaaattggcttttaactgnttcccaaatcaagaactagcngaaggagaagaaagtaaattaaagccaatnggcacttccctttcagaagnntcaaaaatgggttagaaattttgatgcanaatttaacccttaancggaagtttcangtcagtccattttaagaatgaatccctggtaggggttcattaccaaaataccaccttgaaanccnnttggggtttaaacttcnttntttccctttcccttnaaaaggttttnttggattaaaaggaanancttctttcccttgttntttggggnaggggancttggncattaangttcaaaaatttgcctcaaaaangggttgggaanggaccctttaaggncnagccngaaantnatnaaccnactttttttanccccnggctnacactaaaactggntgtannctggaaccct

SEQ ID NO: 530 - DNA, 745 bp, Homo sapiens
  misc_feature (1)...(745): n = A,T,C or G
aaactccactgctgaccctgagtgcattcgctatcccctcacctattttgttttgggacaaagtctcgctctgtcacccaggctggagtgcagtggggcactctcagctcactgtaacctccacctcctgggttcaagcgattctcatgcctcagcctgccaaatagctgggattacaggcacatgccacaaagcccggctaatttttatattttttagtagagatggggtttcaccatgtcggccagcctggtctggaactcctggcatcaagtgatctacctgccttggcctcccaaagtgttgggattacaggtgtgagccaccacgccccgggccaaagccaaaaggtcttggaaagggggacttcattcccatcattgaagggtcctaccctttntngaaccttattcttaaactttccccttanccaaaagggcccccatttttnaaaatccaatccacaatttgaaggggttaaaggggttccaaccacatgnaaatttttnggggggggaaaacangtccccattcttttaancccaaatggggcaaattttggngcctttggnaacccccacttcttgggtcaaccttttaaangggggganttgggcctttttgtngccaaatngaacagggttttttccacatggtggggccttttnaaaaaaaattcccttttgtgttgaaaccaaaaaccttgccccgggggggggcccnttttnaaanggggcnaaaattt

SEQ ID NO: 531 - DNA, 384 bp, Homo sapiens
  misc_feature (1)...(384): n = A,T,C or G
ccagcttcgagaaagagttgagaagttaaacatgctcancattgatcatctcacagaccacaagtcacagcgccttgcacgtctagttctgggatgcatcaccatggcatatgtgtggggcaaaggtcatggagatgtccgtaaggtcttgccaagaaatattgctgttccttactgccaactctccaagaaactggaactgcctcctattttggtttatgcagactgtgtcttggcaaactggaagaaaaaggatcctaataagcccctgacttatgagaacatggacgttttgttctcatttcgtgatggagactgcagtaaaggattcttcctggtctctctattggtggaaatagcaaaacttgcccggcnggccgttcg

SEQ ID NO: 532 - DNA, 589 bp, Homo sapiens
  misc_feature (1)...(589): n = A,T,C or G
ctgctgcttgtgctgccatgtccgcaccggcaccatcctgctcggcgtctggtatctgatcatcaatgctgtggtactgttgattttattgagtgccctggctgatccggatcagtataacttttcaagttctgaactgggaggtgactttgagttcatggatgatgccaacatgtgcattgccattgcgatttctcttctcatgatcctgatatgtgctatggctacttacggagcgtacaagcaacgcgcagcctggatcatcccattcttctgttaccagatctttgactttgccctgaacatgttggttgcaatcactgtgcttatttatccaaactccattcaggaatacataccgnaactggcttcctaattttcctacaaaagaatnatgtcattgtaagngaatcctaccttggttggggcccctaattaatncttcntggntaattaacattaatctttgacttttaaaggggttaacttggaataagccttggggttttnggaaactgcttncccgaaanccattcnaatggggnngggaaacttcctttggatggnccctggggtttantnttaaccc

SEQ ID NO: 533 - DNA, 502 bp, Homo sapiens
  misc_feature (1)...(502): n = A,T,C or G
ctgccgatgtagcctcggtaggtggctattagagctctaccatatacagtggtgcatcttcaaatttatgcatcaaactaaagacatgtccaagtccattttaatttcctcagtggttttatgagaagttttatgggcctcccccaattgtctttttattttgggttatgacgatcatgtttgataattacaatgatagtctctttccacgtgatgcttttgtttgaacctgataaaatttagtgaaactttgtaatgatctatgtgcacttttacttgtaaaatggaatttctgtatgtttatacttgtaaatatgattgttgttagtgctcctgttgctcatggtgtcctgcctcgcatttggtgaatctnnttaatgancangtattcttaactnatttcntaantgggngtnggnaatnaggggaaaatgggggcaaggnggggggggtaantttggccccccntgaaattctccattnaaattngggnntctttccc

SEQ ID NO: 534 - DNA, 245 bp, Homo sapiens
aaattaaaaataattattaaaaaaaggaaaactttaaggaattcacaatcaattgcctgactcattttgatgtcatgtacagcatatggaggtcaggaaggctatttgcagcacatgtgattaggggctactgatcttcagggtttagctttcttccaaacagtgtaaaatacccacaattccaagtatgaagggacacagacgatctcctttgaaaattccacaggacaatacaggcgccccag

SEQ ID NO: 535 - DNA, 438 bp, Homo sapiens
  misc_feature (1)...(438): n = A,T,C or G
cgagacagttactcaagcagccgaagtgatctctactcaagtggtcgtgatcgggttggcagacaagaaagagggcttcccccttctatggaaagggggtaccctcctccacgtgattcctacagcagttcaagccgcggagcaccaagaggtggtggccgtggaggaagccgatctgatagagggggaggcagaagcagatactagaaacaaacaaaactttggaccaaaatcccagttcaaagaaacaaaaaaaagagtggaaactattctatcataactacccaaggactactaaaaggaaaaattgtgttaccttttttacctgcccggggcgggccgctnnagggcgaatttcagncactggcggccgtactaagtggantccaanctngngcccaagctttgncgtaatcatggcatagttnttctgtgacc

SEQ ID NO: 536 - DNA, 609 bp, Homo sapiens
  misc_feature (1)...(609): n = A,T,C or G
gagagcgagctgagtggttgtgtggtcgcgtctcggaaaccggtagcgcttgcagcatggctgaccaactgactgaagagcagattgcagaattcaaagaagctttttcactatttgacaaagatggtgatggaactataacaacaaaggaattgggaactgtaatgagatctcttgggcagaatcccacagaagcagagttacaggacatgattaatgaagtagatgctgatggtaatggcacaattgacttccctgaatttctgacaatgatggcaagaaaaatgaaagacactgacagtgaagaagaaattagagaagcattccctgtgtttgataaaggatggcaatggntattttantgcttnaaaacttnnccttgtgatnacaaaccttggananaagttaccanatgaanaanttnataaaatgatcagggaaccnatttgatggngatgggcaagtaactntnaaaagttttcaaatgatacagcaaatgaaacctttncanaatgtgttaaattcttnncaaattntttattncctttnttttttgnactttttttaaaggttttncttctgnaaaaaaattgctttttnnaattagga

SEQ ID NO: 537 - DNA, 544 bp, Homo sapiens
  misc_feature (1)...(544): n = A,T,C or G
ctcaaatgtataaaccattaagtagtcaaatggctacagtgaaaaacagtattttatagtaggtatagataattggcacagataagctcagaaaagaatgatcagttcttgctggagtaattctagggaaatggctttcatggagaaaaggaaaagaggaagtgtagtatcagtctatgttgtctattgctaatgtggaatggtgttttctgcttctacgccttactgattccagtttttatatttagaaaacaaattaagtgaagcttctggaggtagggctgaaaatggtgaaagaagtgacttggaagaggacaacgaaaagganggaaccggaaatggaaccattgatgctgntcctgtngatgaaaatcttttcactggaaaaggattnggatgacctnnanaaagaattaantccccttgnttttanaanaatgacnccaacncaccttgaaaaattaanttannttcaccccaagttnaaatngcctccattaatttctttccccctnnaatcaccnggatntttatttcctatgct

SEQ ID NO: 538 - DNA, 279 bp, Homo sapiens
  misc_feature (1)...(279): n = A,T,C or G
aaaatcctgattttggagacttaaaaccaggttaatggctaagaatgggtaacatgactcttgttggattgttattttttgtttgcaatggggaatttataagaagcatcaagtctctttcttaccaaagtcttgttaggtggtttatagttcttttggctaacaaatcattttggaaataaagattttttactacaaaaaaaaaaaaaaaaaaaaaaaaaaaaaaaaaaaaaaaaaaaaaaaaaaaaaaaaaaaaaaaaaaanaaaaaaaaaaaaaaa

SEQ ID NO: 539 - DNA, 555 bp, Homo sapiens
  misc_feature (1)...(555): n = A,T,C or G
ccgcctgctactgantaaggggcattcctgttacagaccaaggagaactggagaaagaaagagaaaatcagttcgtggttgcattgtggatgcaaatctgagcgttctcaacttggttattgtaaaaaaaggagagaaggatattcctggactgactgatactacagtgcctcgccgcctgggccccaaaagagctagcagaatccgcaaacttttcaatctctctaaagaagatgatgtccgccagtatgttgtaagaaagcccttaaataaagaaggtaagaaacctaggaccaaagcacccaagattcancgtcttgttactccacgtgtnctgcancacaaaccggnggngttttgttttnaaaaancagcgtcccaagaaaaaataaanaaaaagcttgcaaaatattcttaactttttggaccttngggccgcnaaccacccttaangggcnaaattnccancncacttgggnggnccgtttacttanngggaatcccaaacttnnggtnccccaaacntttgggngnaaaatcattgggncatttaac

SEQ ID NO: 540 - DNA, 678 bp, Homo sapiens
  misc_feature (1)...(678): n = A,T,C or G
ctgattaatcattgttgatgactgcagtttttcccatccttcccgatttacatctgttcaggccaattcaaatatggtgagtaaatgaattagacatgcaaattcaagccccaggctagaaagagggagagagaggaaaagagagagaaagagagagagcgcgcgcatggctgaaatcctaggcgagaagaaagattcttctgcctgatagttattttaatgctctaaaaatcctgcaaatcagaccttcctgtcccttgcaggataactgtaaggctttttaatgtaaggaggcttctggaggaagtgaagagctatggaaacacacacatagtgnggnaaaatttcacattttttaaaaattttttaaaaaccaccgaatatggatacagtttatanctttacatattccttttggcccttaaggcttatttagtttttagcatngtccccaaatggcttcagtgggntttcctgnttttnaanggccctttnanaaataggggagctccttgggcccgaatnaatccaaaatggaactccccgnnttgccaaaaaacttgatttnaaatagtccccttggggaaaagcatttcccttanctcctgacttnaatgccctanttggcccccttgggcggaaccctttaggnaattcnccnctgggggntttttgggg

SEQ ID NO: 541 - DNA, 345 bp, Homo sapiens
  misc_feature (1)...(345): n = A,T,C or G
ccagagaagcaagtgtactgatatccaagagcaggagaaaatagatgtcccagaacaagcagagaggctgattttgtccttcctctgcctttttgtttcatatggggcactgaatggactgatgcccatccacattattgagggtggatcttctgtactcagtctaccagtagaaatgtcaatgacttccagaaacaccctcaccaacacacgtggaaataatgttttaccaggtatctgggcatcccttggttcactcaagttgacacaaaattaaccatcacagaaggagactggccttactctgaaattaggaaactaaagaaagtgaccanaatggaaact

SEQ ID NO: 542 - DNA, 514 bp, Homo sapiens
  misc_feature (1)...(514): n = A,T,C or G
aaaactcgtttcagacagtttgtctgaacatgagaagaacaagaacaaagagggagatgataagaaagagggaggtaaagacagagctttgaaaggagttttgcgagtgggagtattggcaaaaggattacttctccgaggagatagaaatgtcaaccttgttttgctgtgctcagagaaaccttcaaagacattattaagccgtattgcagaaaacctacccaaacagcttgctgttataagccctgagaagtatgacataaaatgtgctgtatctgaagcggcaataattttgaattcatgtgtggaacccaaaatgcaagtcactattacactngacatnttccatttttccaaaaaaaaaccntgagggaagganatntaacccttnggtnttggtgaaagacccnccggaccttnttggacaggcaaaaaatgcccttgaccnttnttggcttgnnttttcccccncccntaantgggttccaggnttnnaacttaaatgggcttgcca

SEQ ID NO: 543 - DNA, 590 bp, Homo sapiens
  misc_feature (1)...(590): n = A,T,C or G
aaagtttgtgcctgtaatacagtccgtgatatactggaaggcagaacaattagtgttcaatttaaccagctatttcttagaccaaataaagagaaaatagactttcttcttgaggtatgttcaagatcagtaaatttagaaaaagcttcagagtctttgaaaggaaacatggctgcttttctaaagaatgtgtgtctggggttggaagatctgcagtatgttttcatgatttcttcacatgagcttttcattacattgttgaaagatgaagaacgaaagctacttgttgatcagatgaggaagagatcccctagagtaaatctgtgcattaaacctgttactttantttatgatatcccacnttagcaantgtcaacattggcagttngagcatcaacttatattggncagtggatccttggaggattagaccaaatttaattgaatacatgggntgactttanaacccccntctggaccgggnttaataanngggaaatncctttttgnttttngggggntanccngggaattaaanaaatttaacaanaaaatttggnttttttnttttggaccttnccnggggggcc

SEQ ID NO: 544 - DNA, 552 bp, Homo sapiens
  misc_feature (1)...(552): n = A,T,C or G
aaatttctccctttgtgtgagtatgactatagttctggcctggtgttttctatttatttagttttagatgtcagcattttactatacttggtcctctcacttcagaataacagggctatttattgatacaaaggagaggtgttcagatcatcttgttaagatgcagagctcaaaataaacactaaatctttatttggagatccacatccttcctcaaaggaaggctcatgagtaaatttgtatgcagtataaagcccaagtagagggtgtatttttaatgactactttgcttacattttagattgtgcaaatgtctcaatcaatgcttncaggaatgtggaccttcctcagttttagcnananaacccttgaccaataaaatactgttgcatgctttccaataanctgagggattgggatagaaatgcttatctacccgnttntganggagaaaacaanancagnggcntgnaaaattttccaacnnanaatcgtaatngggttcaaatgancccngtaaaaccattttntncccttaggggggaaaacccc

SEQ ID NO: 545 - DNA, 585 bp, Homo sapiens
  misc_feature (1)...(585): n = A,T,C or G
ggcggctaccagtgtaaagccagagctgaggttcttgatagtccacaatgggtgaaccacagcaagtgagtgcacttccaccacctccaatgcaatatatcaaggaatatacggatgaaaatattcaagaaggcttagctcccaagcctccccctccaataaaagacagttacatgatgtttggcaatcagttccaatgtgatgatcttatcatccgccctttggaaagtcagggcatcgaacggcttcatcctatgcagtttgatcacaagaaagaactgagaaaacttaatatgtctatccttattaatttcttggaccttttagatattttaataangancccttggagtnttaaaccanaaganaaactttnaagaatnttaagcttcttttttgtccccntncttcttnttntaaatgaattcccgaccccaccaagcaagaaaaaaaccttganantcatgattgganggnccaaaaacctncaacgggtttgaaacagaacttngggccgcnaccacccttaagggcnaaattccacacccctgggnggncnttacttngnggggatccnaactttgg

SEQ ID NO: 546 - DNA, 563 bp, Homo sapiens
  misc_feature (1)...(563): n = A,T,C or G
aaaaagcaatttagattttacgtgaattagacgggtgtgtcttactcccatccagataaaatatgggcagggaagcctggactcctggagatgttcctgcaggaagtccatgggcacctgagtagttggaatgggaagggagagtttgacccgagacagagcatgagctcctcccaggaacaaaggctttatgaaaatatcctgcttcccatccctgggagagggtcagggtgggcggaagggtcaggagaaagaaagatcatcaaagaagaaagtcaaccaaaaactggaaaagagcggacccatcccattgtttccactgaattcatgtcatgagaacaagacttctnggggcccattttcctgtttctcttgccnttttcttnatgaanaatcttgtcttggacttatgggccctgtaacagttttggacagtcaagggcnccaggctatcaaacctcggccgcgacccccttaagggcgaatttccaccnccttggcgggccgtacttannggaatcccaacttcggtncccaacgttgggcgtaatcatnggcaatag

SEQ ID NO: 547 - DNA, 337 bp, Homo sapiens
  misc_feature (1)...(337): n = A,T,C or G
aaatatcacaagtangtcttaagtgtcatctggcatcttctttctgtagccaggtaactcttagatcttattcatcagcctgctgaacagttcctttttcagagacatagataccatccaaaaatttcctgatatccttgtttttaactgttgtggcttgctgaatcaaagccgctgaatttgaaacaagctcaatgtcatttccttcaaggattaattcatctttctgggcttgagatactgaacaagcaacacctggtctcatccgaaccctgcggatatatttttcacccaagaaatttcggatttnaacaagagacccattctnctggataac

SEQ ID NO: 548 - DNA, 390 bp, Homo sapiens
cctttacagaaacatttttagtaatgaggatgagaactttttcaaatagcaaatatatattggcttaaagcatgaggctgtcttcagaaaagtgatgtggacataggaggcaatgtgtgagacttgggggttcaatattttatatagaagagttaataagcacatggtttacatttactcagctactatatatgcagtgtggtgcacattttcacagaattctggcttcattaagatcattatttttgctgcgtagcttacagacttagcatattagttttttctactcctacaagtgtaaattgaaaaatctttatattaaaaaagtaaactgttatgaagctgctatgtctaataatctttgctttccaaagggttggggtttggtgg

SEQ ID NO: 549 - DNA, 380 bp, Homo sapiens
  misc_feature (1)...(380): n = A,T,C or G
ctgccgatgtagcctcggtaggtggctattagagctctaccatatacagtggtgcatcttcaaatttatgcatcaaactaaagacatgtccaagtccattttaatttcctcagtggttttatgagaagttttatgggcctcccccaattgtctttttattttgggttatgacgatcatgtttgataattacaatgatagtctctttccacgtgatgcttttgtttgaacctgataaaatttagtgaaactttgtaatgatctatgtgcacttttacttgtaaaatggaatttctgtatgtttatacttgnaaatatgattgnngntagtgcttcctgntgcttatngnggnccggccncnccttttgtgaatnctggtaa

SEQ ID NO: 550 - DNA, 313 bp, Homo sapiens
  misc_feature (1)...(313): n = A,T,C or G
aaaaaggtatttttttcctaattataaaactgatgtgtcagttacggaaaaattagaaatgcagcacaaatacatgaatattttaccacgaaattgccatataatatcttgtcttttttgggggtgtgaattttttgcattgttctgatcatattctttatcatgtaatttatgttcttttttactaagtattatgtgtggttattatagattttcacaaagatatattgctggtaatatattntattgtgtagtcttataatttacttaaccttctttcaattgttagaaatttaggctatttccagatttt

SEQ ID NO: 551 - DNA, 332 bp, Homo sapiens
ctgaggttgtcagtacaatgaaaccaaactggcgggatggaagcagattattctgccatttttccaggtctttgagttgcacgtcaaatctggggctgatcaccccacacttgtttagcctgcctgtgaggttcacaacaattttcccagctctgtggtcatcaatgatttcaaattcgctaatgtaaccatgcttcatcatcacagtgagaaaccggacgatgactttggagcacggcctaataagcacctggcgtttgcctctcttttcggcattgttgatactcttgagagcatctgccaggacattcatgcgcaccattgtggcggcg

SEQ ID NO: 552 - DNA, 586 bp, Homo sapiens
  misc_feature (1)...(586): n = A,T,C or G
aaatgcaagacaacttatgaggccacttgaagaccaacctttacccatgacatctggtaacttttcttctttgagatggggtcacccaggctggaatacagtggggcagtcagctcactgcagcctcgactgcctgatatcaaggcagcctcccaaatagctgggactacagatgtgtatcaccaagcccaactaatttttctattttttgttgacaggctctcactatgttgcccaggctcgtctcaaattcctggacttgggatccatctgcctcagcctcccaaagtgctgggattacaggcgtgagccactgtgcctggccctggtaacttttaatgttcctttgaagggntttcctagtatgaggatgggcaagcttactgagtctgtgngtgtcatgcttaccaccaaaacggtttcacaaagctgaaaccacttaccaaaattngttccttganaccaaaaatgaatgntcacaggagcncactgnttgantgatctttactnttcnngggaatttactngccgncccctaggnnatcaccatgnggcgtctatgaccactcggccantgngaaatgga

SEQ ID NO: 553 - DNA, 368 bp, Homo sapiens
tttttttgaggaattaacagtctttattgggctcagaccaggagtccgtgggtcttgaggacctctgtgtatttgtcaattttcttctccacgttcttctcggcctgtttccgtagcctcatgagctgtttcttcttccggtagtggatcttggctttctctttcctcttctcctccagggtggctgtcactgcctggtacttccagccaacctcgtgagccaggcgccccagataggcaaactttcttgtaggcttcagacgcacgaccttgagggcagcaggaaccaccatccgctttttcttgtcgtagggcggtgggatgccgtcaaacaccttgagacggtccagagcggcacctgccgggcg

SEQ ID NO: 554 - DNA, 129 bp, Homo sapiens
cagtttgcctggagacatttctactggtaccttaccaatgagggtatccagtatctccgtgattaccttcatctgcccccggagattgtgcctgccaccctacgccgtagccgtccagagactggcagg

SEQ ID NO: 555 - DNA, 582 bp, Homo sapiens
  misc_feature (1)...(582): n = A,T,C or G
ccagtccaagctggaggaggccacaatgattcattagagctttgaggttgttcttgaagagctgaatataggacatgagctgtcccggtgtgactctccccatactcatcttgattggcaggttttctctgcttgccgcttccactagatgtctccgaacttccatcactgcctctttgtgcttagtgttcagtaaagcttcccatagggctttggctgtggtgtcactggattgtgaaagacagcctggtgcaaccacattataattttcctcctcagtatggagtgcagtgagcgctatcatgttaaccatcacatcatttgtgtggcctgggagctggggaagtgctgaaatgatcttctctactaagttgtctccatgatgtccaactgctnctgtgaaaatccaggggtctgttcacaaaaaaccacttgatgccctgnctgcagcangcttctttcttttctttgcnggggcataattggacctcggccncgaaccnccttanggggnaattcnacaccattggngggcgtncttatggatccaacttgnnccaacttggnnaanatgggntactg

SEQ ID NO: 556 - DNA, 359 bp, Homo sapiens
  misc_feature (1)...(359): n = A,T,C or G
cctgaaggaagagctggcctacctgaagaagaaccatgaggaggaaatcagtacgctgaggggccaagtgggaggccaggtcagtgtggaggtggattccgctccgggcaccgatctcccaagatcctgagtgacatgcgaagccaatatgaggtcatggccgagcagaaccggaaggatctgaagcctggtcaccanccggactgaagaattgaaccgggaggtcgcttggacctcggccgcgaccacgcttaagggcgaaattccancacacttggccggnccgttcttagtgggattcccaacctcggnaccaaagctttggcgtaaatcattgggcattancttttttccctgtg

SEQ ID NO: 557 - DNA, 256 bp, Homo sapiens
ctgtccagtgacatctagggaagcccagcccccagcagcagcaggaactcttggggacagtctgtcttgttgcaaagccagcacagcaagcagcctccgcattagttccatagcttgactggcttctaagatgggcatgtcaagatccagaatctcaaagcatcccctctttggctccatcatccaagggtgagaaacagcagagcctaagtgagagtctgagtcaacaccttggctcagttttcaaatgaatttt

SEQ ID NO: 558 - DNA, 591 bp, Homo sapiens
  misc_feature (1)...(591): n = A,T,C or G
ggaaaaaaaattagaggatgaagccaaaactaacacattctaaagaattgcaaggaaagcaactatgtaattctgttgaaaaaggaaagctcaggaaatactctttttatttcttttgattctagctgtctgcgagcctggctgtggtgcacatggaacctgccatgaacccaacaaatgccaatgtcaagaaggttggcatggaagacactgcaataaaaggtacgaagccagcctcatacatgccctgaggccagcaggcgcccagctcaggcagcacacgccttcacttaaaaaggccgaggagcggcgggatccacctgaatccaattacatctggtgaactccgacatctgaaacgttttaagttacaccaagttcatagcctttgttaacctttcatgtgttgaatgttcaaataatggtcattacacttaanaatctggnctgaattttntancttcttataaaatacttgaccgatattacctcntccntttaagtttctnaatccntctgtncctgaagggntanaatttttggttnanggctttngggacaaatttttttttgcnatggtnggtaaaattt

SEQ ID NO: 559 - DNA, 650 bp, Homo sapiens
  misc_feature (1)...(650): n = A,T,C or G
aaaaaataaaattataaacaaaatacagaaaaatattgacacctgtgataacaaggaaatgactcttaagggcagtttgttgtcctgggggaaaaaatcataagtgttataaagaaatattattgtgcaaaggaggaatgtaatatttaaggttcatttacaacgggcatttggcgtcgacagaaaaagtctttctatgtatacattcaacattttgcagcatatttacattcaagttacatttccaaattctatgccaaatacagtctaactcaccatcaacaatccctcagatattactaaaatcctgtttatttggtaggagtgcaatattatcttattaggaaataattttatgttcctactaagtcaactgcatttttactactttaacaaaattcactgacatttttatccccgttgaagtcnaacctcttttnnaccaaantcaatacttactcaatggtgccngtnttaaaatatatnataatccttttcctccctcctttnaaaaaccgnntttcaacnttcaatgaaanggcccccccttttganaaatttttttntttttccagaaattnggatggtttacaaanaccaatttcccaaattttacttgttttcnaanaaaggtggaacccttttccttt

SEQ ID NO: 560 - DNA, 482 bp, Homo sapiens
  misc_feature (1)...(482): n = A,T,C or G
aaaagatgtagataaaattttattaataacagaagacttaaaaaacattggaaatacttttttcaaatcccagaactgggagatggctattaaaaaatatgcagaagttttaagatacgtggacagttcaaaggctgttattgagacagcagatagagccaagctgcaacctatagctttaagctgtgtactgaatattggtgcttgtaaactgaagatgtcaaattggcagggagcaattgacagttgtttagaggctcttgaaatagacccatcaaataccaaagcattgtacccgcagagctcaaggatggcaaggattaaaagaatatgatcaagcattggctgatcttaagaaagctcaggggatagcacccagaagataaactatccaggcagaattgcttgaaagtcaaacaaaagataaggcccngaaagataaagagaaggcgtttttccaaaatggtttgcttaaaaaggat

SEQ ID NO: 561 - DNA, 562 bp, Homo sapiens
  misc_feature (1)...(562): n = A,T,C or G
aaagcctgatctggtgtgaataatcaactaggaaatctaaacttggataacacgtggtgaacaactgcctttagctggtccagattaatcatttcaaagacatccattttagatcacaagcaggaagtcgatagtctcaaaggcactttgtttctcccaagtaggccaccaggcagcctctagagttgctttacccaaatccttctccagccatgacttggtgactctaagcttgctcccacctgccccctccacttccctcagatgatgaggagccagggctaagggggcagccttctctcttcccagtgatgcacatccttcacattggctgctttgttctggaatatggatatctcaacctggatgcccgaggaagctgctggatgcttaatggtgctagaagctcaagtgtgtttgaaaccaaaacccanttgtcccccatgcnnaaagaaatcctgtgtgancctnttggtnttanaaaanaaatctggccntttttttaacattnacntttttgccttttagggaaananaccggggaacaaaaaatnaattttgg

SEQ ID NO: 562 - DNA, 323 bp, Homo sapiens
  misc_feature (1)...(323): n = A,T,C or G
aaatgacaccaccaagcctgtgggccttctcctaagtgaaagattcattaatgtccctccacagatcgctctgcccatgtaccagcagcttcagaaagaactggcgggggcacacagaaccagtaagccatgtgggaagtgctacttttaccttctgattagtaagacatttgtggaagcangaaaaaacaattccaaaaagaaacctancaacaaaaagaaagctgcgttaatgtttgcaaatgcagaggaagaatttttctatnaggagcagggaaaacctgaagtgcttgnangtncataccaaggaagaggattggaat

SEQ ID NO: 563 - DNA, 391 bp, Homo sapiens
  misc_feature (1)...(391): n = A,T,C or G
ctgcccaagggcgttcgtaacgggaatgccgaagcgtgggaaaaagggagcggtggcggaagacggggatgagctcaggacagagccagaggccaanaaagagtaagacggccgcaaagaaaaatgacaaagaggcagcaggagagggcccagccctgtatgaggaccccccanatcagaaaacctcacccagtggcaaacctgccacactcaagatctgctcttggaatgtggatgggcttcgagcctggattaagaagaaaggattagattgggtaaaggaagaagccccaaatatactgtgccttcaagagaccaaatgttcagagaacaaaactaccagaccttcggncgnnaccacncttaaggggcgaattccaacncacttggc

SEQ ID NO: 564 - DNA, 554 bp, Homo sapiens
  misc_feature (1)...(554): n = A,T,C or G
cgacaaacaaggtttccccatgaagcagggtgtcttgacccatggccgtgtccgcctgctactgagtaaggggcattcctgttacagaccaaggagaactggagaaagaaagagaaaatcagttcgtggttgcattgtggatgcaaatctgagcattctcaacttggttattgtaaaaaaaggagagaaggatattcctggactgactgatactacagtgcctcgccgcctgggccccaaaagagctagcagaatccgcaacttttcaatctctctaaagaagatgatgtccgccagtatgttgtaagaaagcccttaaataaagaaggtaagaaacctangaccaaagcacccaagattcagcgtctttgttctccacgtgtccttgcagcacaaacggcggcgtatttgttntgaaaaaccancntcccagaaaaataaanaaaaaggttgcanaaaatgcttaacttttggaccttnggccgnnaccnccctaagggcgaattccacccccttggcggccgtcctttgggatccaacttggnccaacttgg

SEQ ID NO: 565 - DNA, 489 bp, Homo sapiens
  misc_feature (1)...(489): n = A,T,C or G
ctgtgtgacataggacatcttctttctctgtctcacttgaataatatgatgtgtcagaggagacatgattgtaattgcctaaagcaattcttgtgatcaagaatcagaagcatgaacagtattgccctctgtgttagcccctttataagggaggatatcatcttcagcatgctgaattgtcatctttcttagcagtgcaaatgactaaaacttagccaatgtagagtttgtccaaatttggagctcataactcagttcttgagcaaagtgaaaagaaaacattgtgattatggggaaaatatttgatgggacttatcaaataaagataggaaaagaagaaaacccaaatattataggcagaaatgctaaagggtttacctgcccnggcggnccctcgaaagggcgaaattncacacactggcggncgtncttagnggatnccacctccgggacccaaacttggggngnaatcatgggcaatancttgtt

SEQ ID NO: 566 - DNA, 607 bp, Homo sapiens
  misc_feature (1)...(607): n = A,T,C or G
aaaattattgagatcatgaaaaacaaggaaacattaataaatttccatagattggaagcaaataagatatgatgactaaatgtgacataatattctggattgcatcctggaacatgaaaaggacattaatgggaaaactggtgagctacattatacaaaataactgatcagtgctcttcaaggtgtcaagattatcaaagacataaaagaatggatgaactgccatagattggaggagacaatgcaatgtgaaatcctgaatttgaccctgaacagaaaatgcaatgtagtggagaaactggtaaaatgcagataaaatctagtttagttaatcatattgtaccaaagttcatttcttagttttgataactcttgatgggtataaaagatgttgaccatgaanaatgcttggatgaagtggtgtgccaccaacctggttgctggtttttgccaccttttcttgtaatttttaccttngggccgggaacccccccttaangggggnaaattcccncccccccttgggnggggccgttnccttanggggaatcccaaactttgggnccccaanctttgggggnaancaatgggccatacntgttncccc

SEQ ID NO: 567 - DNA, 555 bp, Homo sapiens
  misc_feature (1)...(555): n = A,T,C or G
cctacccattctcctagtttcttgttgtcatcaaccttaattaggttgatttggtgttcagcacaaagggcctccaccaacttgacatacataggctcatcacagttggatgcaagcacacaaagatgggcttggcgccttttcctaggtttccggtaggacggatgccattcagaacttttgcgctaacaccatgaactccatgccttcttcccttgggtggcagttttgttccggttgcaagaacccacagtattgagactgatacacgtacttgtctaagctttggcagcttcgcgaattccacgtgctaggccatcgtggatgaagggcagtcttcagaacctcttgtaaaagcagtattaaccgtccattacaccttcacaacaatgnctttcttcggncatggcgggggggtaccgggtgaaanttgaaactttgaaccacccaanncttccgctttcggcnaaattgggaaccttgcccgggggggccgtttnaaaaggggnaaattccaanacacttgggngggccgttactaaagggaatcccaaa

SEQ ID NO: 568 - DNA, 325 bp, Homo sapiens
aaaaaaatcaacagtgttaacagtgggtgggtatgtttccagacctctcaattcactcatatgtacagacaggattgacggggggaatccctaaactttttattctaacaagttttatttatttattttcttttttgacatggagtctcgctctgtcgcccaggctggagtgcaatggcgtggcctcggttcactgcaaccttcgcctcccgggtttaagcaattctcctgcctcagcctcccaggtagctgggattacaggtgcatgctactgcgcccggctaatttatgtatttttattagagatggggtttcaccatattgg

SEQ ID NO: 569 - DNA, 267 bp, Homo sapiens; identical to SEQ ID NO: 436

SEQ ID NO: 570 - DNA, 451 bp, Homo sapiens
  misc_feature (1)...(451): n = A,T,C or G
aaaaactcatcattgccatgtccaggagaggcaatctagctggagtcaggtgatccagtccattcctgtcaaagcctccaacagctacagcacaaacaccatcagtttgcgatggctggggggccttctggaagaagagaggcaaagaaagtcttgaagacaagccatgctgtgctcataaaggaggggctggtctgctcgccatctagtacatccctgtctggagggaggtggttggggtcttcagtttcaggatcagtgccttcctgtaagttattgttggggtcctgatttacaacgtcaggaggaggaccatcatttgggaagttctgaaccggcctcgnctaaatggaaccacccaacgtgatgccttcaaaggaagcacataaaagnccttttaactgatgtcacagnnggacttctnaagaatccaaggttccccccctttatc

SEQ ID NO: 571 - DNA, 385 bp, Homo sapiens
ccacagctaacatcattgcagcacctttactccttcggctgtgatccaatctccagctcactttttgccagcaccaacattggcctttgcagtccccctgactttcttcattctgttcttgcgttcctttcgttgctttcttgaggtctttttcttctcatacaggccatgtcttgcaagtctatgtttgggttcatttttctttgcataatccagggaatcataaatcatgccaaagccagttgtcttgccaccaccaaaatgagttctgaatccaaatacaaagatgacatccggtgtggtcttgtacattttggctagtttttcccgaatttctgtcttaggcactgtcgcttcccggggtgaaggacatcaatgaccattt

SEQ ID NO: 572 - DNA, 582 bp, Homo sapiens
  misc_feature (1)...(582): n = A,T,C or G
ccacttggacctttggcaggaaatcttcactgtgccaaagcattgtgtttctggagccggagctgcctgaggcactcttctccagcctcctcagccttccatggagctgcagaccctacctagacctacccctgccgggctccaaacagatccccctacccattcctttcatgtactgtttggtcctggaagaggctcacacaagttggctttgggttttgcttcaacatagaaaccacgagccttataccttgaatatgggtagtttcattgccagtaatgggaactctggaactgccaaagggactgtatcctctttctgacctggtgttgctttcttttgttaggcttcccagctctgtgcccagcancctgtccagaatgagctgttcagagatccaacaactgcagtctccttattcacttttaaagaattgaaaaccaaaaaggtgagtttctttccttaggaaggttcaaanccccccttcttaantttccctggttgaaaactttttgctggcttgccccntntngggaaaccnggggggaagggaacnttnccaaaaaaatttcccggggggg

SEQ ID NO: 573 - DNA, 540 bp, Homo sapiens
  misc_feature (1)...(540): n = A,T,C or G
ccactgcngactgagcggtggaccgaattgggaccgctggcttataagcgatcatgtttctccagtattacctcaacnagcagggagatcgagtctatacgctgaanaaatttgacccgatgggacaacagacctgctcagcccatcctgctcggttctccccanatgacaaatactctcgacaccgaatcaccatcaanaaacgnttcaaggtgctcatgacccacaaccgnnccctgtcctctgagggtcccttaaactgatgtcttttctgccacctgttacccctcggagactccgtaaccaaactcttcggactgtgagccctgatgcctttttgccanccatacttttttggcatccagtctctcgtggcnattgattatgcttggggngaaggcaatcantggnggcattcaccccttaaangggaaccacatttggacttttttttttttcatatttttaacctttgggcccggnaaccccccccttnaaggggccnaaatttcccaacnaccaccttgggnggggcccntt

SEQ ID NO: 574 - DNA, 510 bp, Homo sapiens
  misc_feature (1)...(510): n = A,T,C or G
aaaatttagattagcacaccttactaatctgacagaacctggattctcttgatattggaagaagatgagagtggataccggggaagtcactagaagtatctgtcactcttggctggacagcaggctgcaaacatattaccacttgatggaggcatcatgctctggtcgcaatccgtgtgcatcaggtaccagtaacaaagtggtactgagaaatatcctcatgtcacatagatctcaatatgccattggtcaaggaggttgtccagaaggaaattaggacgttatcaaggatgaagctatagtaaaaatactataaacaaacctttcttgatgaggcttaagggttatttagaggagtataaccttaaaaataaagatgaaaaatttatgaaccgggctctgttttcatgatgagagagtacgtgcantcccctgnccnggcnggcgctngaaagggccnattncancacctggcggccgtnctatggatccnacttggnncaaacttgg

SEQ ID NO: 575 - DNA, 512 bp, Homo sapiens
  misc_feature (1)...(512): n = A,T,C or G
ctgaaaacagtgggaggccagatgctggcatcttccagacgggagcatagccatggtcactctagccgatgtctcctggggctctcaggcggcaaggaccagatgcaccactactgtccaatcccagttttacttagagccacctccttttttggggccattagtccttatttcatgccagattttcactagcggctccctgttcttccaaatcagttcatgaccgtaagtaacataccatattccaaaaagagctcccccaagatgtgccgcatgatcaaaaaatttccatcccaggatcattcctgctgtatccatggcgataatggctttcagggcattccctgctgtgaacgtgaacatcggaaggaaaataatggcaagcctccttctgggatcttantgcagacagacctgcccgggcggccgttcgaaaggggaattccacacactgcggccgttctatggatccaactcggaccaacttgggtaanatggcntantgttcctgg

SEQ ID NO: 576 - DNA, 437 bp, Homo sapiens
  misc_feature (1)...(437): n = A,T,C or G
ctggtgctctgggtctaccctacctgacatccttccagtcttatcctttgtttcctatccaggcccaggcttgtggctgagaacatccactttcagtcccatatacctgcctccaagtgtggtacagagaacttgggcctgctgggggcgcttagccttactctctccaccacctctcccaccaacccccagatgaactgcaggtagacgtttcttccttgcttggagccccagtttttgcatttcattttcattaaaatgaaaggtggtttggttttggttctaaggagctctacagtttaacagaaangagggaccttagggggccaanaaagcaggggcctaccaagtatctcccntttgaaaatggaatactgataaaaaatttttacctgcccggcggccctcaaaaggngaaatccanacactggcgggcg

SEQ ID NO: 577 - DNA, 267 bp, Homo sapiens; identical to SEQ ID NO: 436

SEQ ID NO: 578 - DNA, 354 bp, Homo sapiens
aaaactcaatgtttgcctaatcaaagatcatctggctaaactgctcccccacttctgcttagctactttggaagcacaaaagttacccctttccatccttggcccttccctggttggtacatctagttatgagatagacgcgcaccacttaacaaatcactcccttttgaccgcaggttgtttctcttccatatttgacgaggctggcaacagctcccgaatcttggcctagcacatcacgaattgggaagctaaagctttagcttagaatgccaagtgacaaggacatggctgaagcaggaggggaaattctggaacaagtgcctctgggcaaacctcacaaccgagtttttt

SEQ ID NO: 579 - DNA, 402 bp, Homo sapiens
  misc_feature (1)...(402): n = A,T,C or G
aaaaggctagaacatcctttgacttcttgaaaatctgcatgtctggcttgggttttattaccacatgcctgagttcttcaagaatggaaggctcaagtattctcatcttccatttgccaaacttccttcctgatttgagtcacgtgttccacttggaaagaaagggaacagagagcctcctccatggacagtgtatgaatttcattgggaatcttgctctctcccgcctctatgcctttctctctttttaaccttactttacataatattatagatgggccangaaaagaaaagatgacataacattttgatgaattacacctattccattcttcacgtttcacaattggtccgaactttggttnnaagaataatngtnagaaggcntnggntccaaaaaac

SEQ ID NO: 580 - DNA, 524 bp, Homo sapiens
  misc_feature (1)...(524): n = A,T,C or G
ccattgatttaggccactggcttagagtactccttcccctgcatgacactgattacaaatactttcctattcatactttccaattatgagatggactgtgggtactgggagtgatcactaacaccatagtaatgtctaatattcacaggcagatctgcttggggaagctagttatgtgaaaggcaaatagagtcatacagtagctcaaaaggcaaccataattctctttggtgcaggtcttgggagcgtgatctagattacactgcaccattcccaagttaatcccctgaaaacttactctcaactggagcaaatgaactttggtcccaaatatccatcttttcagtagcgttaattatgctctgtttccaactgcatttcctttccaattgaattaaagtgtgggnctcgtttttagtcatttacctcggccgcgaccacnctaanggcgaattccacacactgcggccgtactantggatccaactcggaccaacttggcgaaacatgggnatantgttcct

SEQ ID NO: 581 - DNA, 504 bp, Homo sapiens
  misc_feature (1)...(504): n = A,T,C or G
aaaatgttcatgtagaaaattaatgaactataggaatagctctaggagaacaaatgtgctttctgtaaaaaggcagaccaggggtgtaatgtttttaatgtttcagaagcctaactttttacacagtggttacatttcacatttcactaatgttgatatttggctgatggttgagcagtttctgaaatacacatttagtgtatggaaatacaagacagctaaagggctgtttggttagcatctcatcttgcattctgatcaattggcaagaaagggagatttcaaaattatatttcttgatggtatcttttcaattaatgtatctgtaaaagtttctttgtaaatactatgtgttctggtgtgtcttaaaattccaaacaaaatgatccctgcatttnctgaanatgttacctcggccgcgacacgctaaggcgaattcaacacctggcggccgtctagtggatccnactcggnccaagctggcgaatntggnatactgttcct

SEQ ID NO: 582 - DNA, 511 bp, Homo sapiens
  misc_feature (1)...(511): n = A,T,C or G
aaaatttagattagcacaccttactaatctgacagaacctggattctcttgatattggaagaagatgagagtggataccggggaagtcactagaagtatctgtcactcttggctggacagcaggctgcaaacatattaccacttgatggaggcatcatgctctggtcgcaatccgtgtgcatcaggtaccagtaacaaagtggtactgagaaatatcctcatgtcacatagatctcaatatgccattggtcaaggaggttgtccagaaggaaattaggacgttatcaaggatgaagctatagtaaaaatactataaacaaacctttcttgatgaggcttaagggttatttagaggagtataaccttaaaaataaagatgaaaaatttatgaacggggctcttgtttcatgatggagaaggtaccgtccagtccacctgccccgggcgggccgttcnaaagggcgaattccncanctgcgggccgttactagnggantccacctcggtncaa

SEQ ID NO: 583 - DNA, 543 bp, Homo sapiens
  misc_feature (1)...(543): n = A,T,C or G
aaacctttatactcccctgaatgaatttgaagaacgggtaacagtggcctttatacgaacaatccaggcacaactacaagagcggaatgaccctcagcaactgctattagatgccaagcacatgtttcctgttttgtttccatttaatccatcttctctaaccatggactcaatccacatcccagcgtgtctcaatctggaattcctcaatgaagtctgaagatgcatgtttccagcattagtttgattcccaatgtgagcaagaaggaagtatatacagtaaagtaaattcaaggatctgttaaatctggtaaaagtagatcaaatcagagattgacagcctgtggagggtgcttgaactatacagaattagacacactatgtcattattttttggacctactgnttanaataaaaacacnttgaaatatgacctcggccgcgaccccccttanggcgaatttccncccactgggcggccgttnctagtnggatccnanctcgggcccancttggnggtaatcatgggcttagtgttcctgg

SEQ ID NO: 584 - DNA, 446 bp, Homo sapiens
  misc_feature (1)...(446): n = A,T,C or G
cctttcactgtggtctgggaaagaatcagtaagatgacagggctgacttcattagatgaggagcttttctatccagtttcctggaggaataaggacactgccttttcagattaaagattgtctgatttagagaccatggaggtggacagagaataacaaaaccgtgatggcagtcatcatgcttattgcagttagcacacacttttcctgacaggcacagtgctgctgtgctctacaaatgaccatgaaatagagcacgccatgactttaggacacagggatttttatgggaagagagttcatcagggactgattacgtaggagagacgatgcaggggaaatggtggacctgcccgggcggncgctcgaaagggcgaattccaccactgcggncgtactantggatccnactcgnacccancttggcgtaatcatggcatactgtt

SEQ ID NO: 585 - DNA, 308 bp, Homo sapiens
ctcttgttgaaatccgaaatttcttgggtgaaaaatatatccgcagggttcggatgagaccaggtgttgcttgttcagtatctcaagcccagaaagatgaattaatccttgaaggaaatgacattgagcttgtttcaaattcagcggctttgattcagcaagccacaacagttaaaaacaaggatatcaggaaatttttggatggtatctatgtctctgaaaaaggaactgttcagcaggctgatgaataagatctaagagttacctggctacagaaagaagatgccagatgacacttaagacctact

SEQ ID NO: 586 - DNA, 333 bp, Homo sapiens
ccagaggagggaggggcacagtgaagaagggagcccaccacctctccgaagaggaaagccacgtagagtggttggcatggggtgccagcatcgtgcaagctctgtcataatctgcatcttcccagcagcctggtaccccaggttcctgtaactccctgcctcctcctctcttctgctgttctgctcctcccagacagagcctttccctcaccccctgaccccctgggctgaccaaaatgtgctttctactgtgagtccctatcccaagatcctggggaaaggagagaccatggtgtgaatgtagagatgccacctccctctctctgaggcagg

SEQ ID NO: 587 - DNA, 111 bp, Homo sapiens
ccatgaagctcttagacaaatctatctctctggacttcattcctggaaaaagaagttcatcagattcaagaacggcatcatcactggcgtgtacccggcaagcccctccag

SEQ ID NO: 588 - DNA, 606 bp, Homo sapiens
  misc_feature (1)...(606): n = A,T,C or G
gagcccacaggggaagagcagcggaaggggcttttcggaacgaatttgnattgaaaggaagtggaanaaacncgganccntggccgttgtggttgctgtttgcggnggtctagggaggaanaagttgacacacttggtaacggcttgctgtcagccttacacatcccgggactcacacggngctttggagaagaggttgttcacaacaggtntccagcantgaggacctgcccatttcaatggaaaatccttataaagaacctcttaanaaatgtatcttgtgtggaaagcatgtagattataagaatgtncactttttgtcccagtttgttctccntttnctggatgcntttntggaaggcccnttacaggtntttgtggaagaacccgaangaatcccaaanncatttagaaaactcaatatggggtttttccnttncntccaaggatcctgcntntttaaggccctaagttgtacctcaaattcgggaataaatnttttccttcccttataacntttttccnnaagggttgttaagccatntgnttaaaccacctttgataaaaaagntttnngaggggggaaaaaaacnttccttttccaat

SEQ ID NO: 589 - DNA, 597 bp, Homo sapiens
  misc_feature (1)...(597): n = A,T,C or G
aaatagctgagcacctactggaagaattcctgggctaaatgctgaaaataaaatttaatttctgcacagaaaataccattaacttagtagcctttgcttaaaggtgggattaattctccatgaagtcagaatgagacaataagcagcattaacttcataggcacacagaactagtgctcaaactgctagcacaaattccaacagagtacataaggctaagtcactactcaagtgtccatttccatcaaatttagagactctccctatgcatctaagggaaggaattatcactgaatataaatgcctccaggagaaacggagaattcagttaaggttaaattagacaaaagataataagtgcaagtactagagaaatgttgctggagataaaccataaaaatttgtgacctaaccgtggcatggggtgaatcgcataagctgctagctggtgaaccccagtgtttcaagatncactttttataaaccgntttatttnggtttgcttatnccatcaaaactggaaacttcctgcccctganattccctngaaaccggggaaatcaatttnaaaaccccnttcntggnggcctttcaaaa

SEQ ID NO: 590 - DNA, 569 bp, Homo sapiens
  misc_feature (1)...(569): n = A,T,C or G
ctgatagcctggtgcccttgactgtccaaaactgttacaggcccatagtccaagacaagattctcatgagaaaaagtgcaggagagacaggaaatgggaccccaggagtctgttctcatgacatgaattcagtggaaacaatgggatgggtccgctcttttccagtttttggttgactttcttctttgatgatctttctttctcctgacccttccgcccaccctgaccctctcccagggatgggaagcaggatattttcataaagcctttgttcctgggaggagctcatgctctgtctcgggtcaaactctcccttcccattccaactactcaggtgcccatggacttcctgcaggaacatctccaggagtncaggcttccttgcccatattttatctgggatgggagtaaagaccacccgtctaattcacgtaaaatctaaattgctttttaccttgcccgggcggccgntcnaaangggcgaaatttccancacacttgggnggccggttcctaangggaatcccaancttcgggncccaancttgggngtaaatcattgggcnatt

SEQ ID NO: 591 - DNA, 663 bp, Homo sapiens
  misc_feature (1)...(663): n = A,T,C or G
agaaaatgtcgacattactctgaagggacgcacagttatcgtgaagggccccagaggaaccctgcggagggacttcaatcacatcaatgtagaactcagccttcttggaaagaaaaaaaagaggctccgggttgacaaatggtggggtaacagaaaggaactggctaccgttcggactatttgtagtcatgtacagaacatgatcaagggtgttacactgggcttccgttacaagatgaggtctgtgtatgctcacttccccatcaacgttgttatccaggagaatgggtctcttgttgaaatccgaaatttcttgggtgaaaaatatatccgcagggttcggatgaaaccaggtgttgcttgttcagtatctcangcccagaaagatgaattaatncttgaaggaaatgacattgagcttgtttcaaattcagcggnttttgattcacaangccncaacagttaaaaacanggatntcaggaaaattttgggatggnntcttttgtctnttaaaaaaggacctgttcaccaggnttgtgaataaaaactaanaattncctggctccnaaagaaaatncccantgacctttanacctctttggaatttacctgccggngggccttcaaaggggaattcncccnttggggccttnttngggacc

SEQ ID NO: 592 - DNA, 297 bp, Homo sapiens
ctgtagccgagagtcaccaggtccccacagggtgtcagagagggtgtggagctgcttagcactcagcatcactgtctggttaaacacagtccagatgacaccctgggcacagggcggtgtagtcagagacccctcatattggaagtagcggctgaagtcagagggcaggagtgcagatatgtccagtcctgggacctgagtctctgagccttcctcagcgatttcttccaagcgagacagcaactgctcataggcactgttttcttccgggccctcctccagaaaggcggccaacac

SEQ ID NO: 593 - DNA, 337 bp, Homo sapiens
ccaccatttcccctgcatcgtctctcctacgtaatcagtccctgatgaactctcttcccataaaaatccctgtgtcctaaagtcatggcgtgctctatttcatggtcatttgtagagcacagcagcactgtgcctgtcaggaaaagtgtgtgctaactgcaataggcatgatgactgccatcacggttttgttattctctgtccacctccatggtctctaaatcagacaatctttaatctgaaaaggcagtgtccttattcctccaggaaactggatagaaaagctcctcatctaatgaagtcagccctgtcatcttactgattctttcccagacca

SEQ ID NO: 594 - DNA, 362 bp, Homo sapiens
cctgctgggaacgggacttctaaaaggaactatgtctggaaggctgtggtccaaggccatttttgctggctataagcggggtctccggaaccaaagggagcacacagctcttcttaaaattgaaggtgtttacgcccgagatgaaacagaattctatttgggcaagagatgcgcttatgtatataaagcaaagaacaacacagtcactcctggcggcaaaccaaacaaaaccagagtcatctggggaaaagtaactcgggcccatggaaacagtggcatggttcgtgccaaattccgaagcaatcttcctgctaaggccattggacacagaatccgagtgatgctgtacccctcaaggattt

SEQ ID NO: 595 - DNA, 546 bp, Homo sapiens
  misc_feature (1)...(546): n = A,T,C or G
aaaattataagatttacagtgccttgattatgcaaaatagcataatggaaattaaaccaaatcaataaaccaaagagaaagaaaacttaattttctctagtatccatacttaaaccatctttgtaagtatctgatgtcccaaccatgtcttatgtagaaagtataatcgtttcaaatgtttcacttgcaggtttaatttctcattttcaatttttatgaactgtaatgcaatttcaaatcctattatacctagtgtttatactgcaacagcagcaaatctcacatgtgtaatcaaatgtggaactggggcacagcttctagctgtagacagaaattatacactgcattcagtccaggagangtacattacattaaccagagcgtagaagttantaccttattgcaggggtgggatttctttccctctgactgaatcaaaactcggccgcnaccccctaagggcgaaattcnncccactggcnggccgtactagtggatccnacttcggnccaacttggngaaacatgggcattactgttccctggg

SEQ ID NO: 596 - DNA, 468 bp, Homo sapiens
  misc_feature (1)...(468): n = A,T,C or G
ctggcaggacctgaaggatcacatgcgagaagctggggatgtctgttatgctgatgtgcagaaggatggagtggggatggtcgagtatctcagaaaagaaagacatggaatatgccctgcgtaaactggatgacaccaaattccgctctcatgagggtgaaacttcctacatccgagtttatcctgagagaaanaccagctatggctactcacnggctcggctgggtcaagggggcccgtgactctccataccaaagcagggggttcccccactactttntntcntttagggcccttcttgaaacaggggaagggnaattttttnntttttttttttagggnaacctgaacccttttttggnccccaaaantccccttcccaaattgggggntttngnggtttaggnaaaantttttaaaattttttttttaccnncccggggggcctttnaaaagggggaaattccc

SEQ ID NO: 597 - DNA, 551 bp, Homo sapiens
  misc_feature (1)...(551): n = A,T,C or G
gagagatatgaactctaacaaaggactgaggagtgcagtctgctggttcaggctcttcaaaagatgtagaaaaagagatagaaggaaccacctatgcttaaaatactgtaaatatgcagtgaggtttggcaaaatctattccatgtgtgatttgcttgtagaaacaattttgaaagccccttgaggaaaataaaaatcaagaagaacacttttctcccttttccatacaaattaaaacttaacagcatcaaattattgggaccagaaaccaagtaatgtataatgggggcttttgttgagttaaataagatgctatataatggagaagaatttgaaaatgcacaaaaaaatcaatctacattatcagacctgcgtgaaattaactatgttaataaaccanttgcagngcccaactataggtctttntcnctaccaggagtacaaactgtntggccggtaannctagctctattgtgnttgnctgctttactgttgtanactactcgtgcttgatattctgcgcccagatccctngnttgcctgcctgntgt

SEQ ID NO: 598 - DNA, 300 bp, Homo sapiens
  misc_feature (1)...(300): n = A,T,C or G
gggaatgtgaaatttacatcatttctttttgggagagacttgttttggatgccccctaatccccttctcccctgcactgtaaaatgtgggattatgggtcacaggaaaaagtgggttttttagttgaattttttttaacattcctcatgaatgtaaatttgtactatttaactgactattcttgatgtaaaatcttgtcatgtgtataaaaataaaaaagatcccaaataaaanaaaaaaannnaaaaaaaaanaaaattttcnttcccggggggncntttaaaaggggaaattcccccc

SEQ ID NO: 599 - DNA, 338 bp, Homo sapiens
  misc_feature (1)...(338): n = A,T,C or G
ccaggccatgttatgggatctcaacgaaggcaaacacctttacacgctagatggtggggacatcatcaacgccctgtgcttcagccctaaccgctactggctgtgtgctgccacaggccccagcatcaagatctgggatttagagggaaagatcattgtagatgaactgaagcaagaagttatcagtaccagcagcaaggcagaaccaccccagtgcacctccctggcctggtctgctgatggacctgcccgggcggncgctcgaaagggcgaattccagcacactttggcgggtactagtggatccaactcggaccaaccttgcgtaatatggcata

SEQ ID NO: 600 - DNA, 545 bp, Homo sapiens
  misc_feature (1)...(545): n = A,T,C or G
aaatcangagcatataggtcataataaaatgagctacaggcacaaagccagtaacacatttatggtccgttcatctggaaaagtttcaccgcccactccccactcctcttccccctcctggaagcggccagctttatccttggcattttaattttagagaaaatttaaacttccatgctgccctgtggcttcggtcaatggagcttctttctccagttatggaatgagtcagcaaaacgggggagttctgatccttggaattagggagggacagtttacagaatgtcctcatttcactcttttcccaatcatgggaaatatccagccaattctggttttaaagattcatatcaaattcaaagtccctccctccttttggcgaggaagacaaccctttggagcgaacacaaaagancaaatgtaaaatccatcttgggcggggcatggtggctcaccctgtaatcccacactttgggangccaagnaggcanatacgaggcaaaaatnaaacatctggactcgncgnacacctaggggaattcacc

SEQ ID NO: 601 - DNA, 232 bp, Homo sapiens
ccattatatcagcaagagatgcaccagtaatggccctctggaatttgactgctcggcgggttcttttcttttgaatttcttccgactgtccctttttgtgcttccttctgtagaggacagtccagtttatctgccgaggattcctcttggaaaggaaagccgactcgcatttcgcattaagaaactggaaaaccttcccgtcggtcctggcgtagcgcctcccgtgtccggg

SEQ ID NO: 602 - DNA, 287 bp, Homo sapiens
ctgaagcacttctcctagatttgctcttaacagaacgaatgcatacgctacagattcctcaacggaatcaacagaattcctttctccacattcctaaaactgggtaccacggtccgcaataatagtcaccagacccatcatcacaggctatgtcactaaaactgaccgaagcgttttccagttcacattttcctaaagattttataatgtgacaacccttctctccttagaaagttatacttctggcacttgaaatgctggatttgttgtcagtttacctgccggcg

SEQ ID NO: 603 - DNA, 416 bp, Homo sapiens
  misc_feature (1)...(416): n = A,T,C or G
cagcctggaggtttggagactcattctggaatctagtgtgggtcaagccaacttcagggagaggctgagccagggtaggagtcacaggagcagacgaggatgtggggtgccgtgcacagagctccatgaccagcttgggaagttagaaggaaggggaggcaggaggctgcttagtctgctgccatgatgggccccatgaatggtggctctcaagcttctgtgctacacaggggtgtctggtggccttgtgacctgccgcagccatgggggctgtggacgaccccatctgctccctctctgaactccatggggcaccacangaatctggacctgtgccacaaccacagcagttgcctctgccctgccacaaacctcggccgcgaccacccttaagggcgaaattccancacacttnt

SEQ ID NO: 604 - DNA, 364 bp, Homo sapiens
  misc_feature (1)...(364): n = A,T,C or G
aaagagcttatcctcagaaataagcttcgtcttgagttgttgaactacaaaacactattttctgcagtcatccgaagaattgtgccattacttgtgatgcctctgaatgtggaggctgactctccctgtctctctgtccctcctaccccacggggccgcagcaaaagccatcctgggccttcgactgggccatgtcttcaggaagattcctgaagaggagggcccgaaatacctgcctttataggttcccagagtgccctaaacattcttagatacatattttttacctgccccggcggccgtcgaaanggcgaattncacacacctntggcgcgtactatggatccaactcggnccaacttgg

SEQ ID NO: 605 - DNA, 775 bp, Homo sapiens
  misc_feature (1)...(775): n = A,T,C or G
actggcattccttcgacttctctccagccgagcttcccagaacatcacatatcactgcaaaaatagcattgcatacatggatcaggccagtggaaatgtaaagaaggccctgaagctgatggggtcaaatgaaggtgaattcaaggctgaaggaaatancaaattcacctacacanntctggatgatggttgcacgaaacacactggggaatggagcaaaacagtctttgaatatcnaacacgcaaggctgtgacactacctattgtagatattgcaccctatgacattggtggtcctgatcaanaatttggtgtggacgttggccctgtttgctttttataaaccaaactctatctgaaatcccaacaaaaaaaaattaactcccnatgtggtcctcttgttctaatcntgtcaaccagtgcaagtgaccnacnaaaattcnnntatttattttccaaaagtttggaaacaannttaatttgccaaaaaaaaaaaaaaccttttnttttttttttgtccncccaancaaatnaaaaagntttttttttnttttttttcccaatnccaatttnaaaaagnntcaangggncttaaaaaaaaaacttcaccccntttttataaanaaccggggnttattttttnaaaccnncccccntccaaaaaaaaanggggtnccccnaaaaaaaaccttttttttttnttnaaaccaaaataaaaaaccccctttttttttnccttgngaaannaaanttttttttccnaaaaaaaaatttc

SEQ ID NO: 606 - DNA, 343 bp, Homo sapiens
  misc_feature (1)...(343): n = A,T,C or G
cccgaatttttggctatgatggctagaaaaatgaaagatacagatagtgaagaagaaatccgtgaggcattccgagtctttgacaaggatggcaatggttatatcagtgcagcagaactacgtcacgtcatgacaaacttaggagaaaaactaacagatgaagaagtagatgaaatgatcagagaagcagatattgatggagacggacaagtcaactatgaagaattcgtacagatgatgactgcaaaatgaagacctgctttcaactcctttttcccccctctagaaaaatcaaattgaatcttttacnttacctcttgcaaaaaaaaaaaaaaaaaaaaaa

SEQ ID NO: 607 - DNA, 255 bp, Homo sapiens
  misc_feature (1)...(255): n = A,T,C or G
ctgtggccctgactcactggccctgctggcatttattcagcacatattaaatgacgaaggctttgagtcaacaccatcagtgggtaatcaatctggttgccctccccctaccctgagagagctatcctgcccataaactatcaaaggttagttttaggaccacataagtaaacaagtcatttagataaactacatttctgtgtatctatgccctaagcttttaagagaattcagacctcggccgcgncnccctta

SEQ ID NO: 608 - DNA, 365 bp, Homo sapiens
  misc_feature (1)...(365): n = A,T,C or G
ggaaacacttcacgaaggggcaaaagtggcttcaattctaagagtggacagcggggatcttccaagtctggaaagttgaaaggagatgaccttcaggccattaagaaggagctgacccagataaaacaaaaagtggattctctcctggaaaacctggaaaaaattgaaaaggaacagagcaaacaagcagtagagatgaagaatgataagtcagaagaggagcagagcagcagctccgtgaagaaagatgagactaatgtgaagatggagtctgaggggggtgcagatgactctgctgaggangggggacctactggatgatgatgataatgaagatcggggggatgaccanacctcggccgcga

SEQ ID NO: 609 - DNA, 205 bp, Homo sapiens
aaaatgctttggtggcacttttgtaaacagattgcttctagattgttacaaaccaagcctaagacacatctgtgaatacttagatttgtagcttaatcacattctagacttgtgagttgaatgacaaagcagttgaacaaaaattatggcatttaagaatttaacatgtcttagctgtaaaaatgagaaagtgttggttggtttt

SEQ ID NO: 610 - DNA, 140 bp, Homo sapiens
aaacttgatccaacctctttgcatcttacaaagttaaacagctaaaagaagtaaaataagaaggcaatgcttgtggaatgtacagtgcatattggcggcgcacgcctcattacgattcgcctgcttgcttctcctgttca

SEQ ID NO: 611 - DNA, 541 bp, Homo sapiens
  misc_feature (1)...(541): n = A,T,C or G
tccctctgtggaagatattcaaaagccacaagtggtgcaaatgtttatggtttttgtttttcaatttttattttggttttcttacaaaggttgacattttccataacaggtgtaagagtgttgaaaaaaaaattcaaatttttgggggagcgggggaaggagttaatgaaactgtattgcacaatgctctgatcaatccttctttttctcttttgcccacaatttaagcaagtagatgtgcagaagaaatggaaggattcagctttcagttaaaaaagaagaagaagaaatggcaaagagaaagttttttcaaatttctttcttttttaatttanattgagttcatttatttgaaacagactgggccaatgtccacaaagaattcctggtcancaccaccgatgtccaaangtgcaatatcaaaggaanggcaggcgtgatggcttatttgntttgnattcnaangatggcttttcccctcggccggnaacacccttangggggaatttccacacacttggcggccgntactagtggatcc

SEQ ID NO: 612 - DNA, 341 bp, Homo sapiens
  misc_feature (1)...(341): n = A,T,C or G
nnctggggtacaagcagactctgaagatgatcagacaaggcaaagcgaaattggtcattctcgctaacaactgcccagctttgaggaaatctgaaatagagtactatgctatgttggctaaaactggtgtccatcactacagtggcaataatattgaactgggcacagcatgcggaaaatactacagagtgtgcacactggctatcattgatccaggtgactctgacatcattagaagcatgccagaacagactggtgaaaagtaaaccttttcacctacaaaatttcacctgcaaaccttaaacctgcaaaattttcctttaataaaatttgcttgtttt

SEQ ID NO: 613 - DNA, 430 bp, Homo sapiens
ctgcaccacacttccagcaaggcctttgggaaaggtgggagagctagaggaataattaaagctggtggaactcagttggagtttagaaagcttcccataaaatgcctgcttgatgctgagttgggaggggagagaagaaggctccagaggctcactgagccccttccctggctctcggggtaatttccagaagggcaagtccatgacaaagggcatcccttccaagtgacccaccagttccaggggactatgcccagtagctttcctgttctcggcatttgccttaagaggaccccccacaaaagtcttctcattcttgacgctgccaacaaaggcatgtgggctttggaacccagtcttcccttggagtctgtaccccaccagacatggaagtttgtgctttggtcccaacaccctcgggccgcgaaca

SEQ ID NO: 614 - DNA, 377 bp, Homo sapiens
aaacttaaattacctctcaagagaccaaggtacatttacctcattgtgtatataatgtttaatatttgtcagagcattctccaggtttgcagttttatttctataaagtatgggtattatgttgctcagttactcaaatggtactgtattgtttatatttgtaccccaaataacatcgtctgtactttctgttttctgtattgtatttgtgcaggattctttaggctttatcagtgtaatctctgccttttaagatatgtacagaaaatgtccatataaatttccattgaagtcgaatgatactgagaagcctgtaaagaggagaaaaaaacataagctgtgtttccccataagtttttttacctgccgggcggccc

SEQ ID NO: 615 - DNA, 596 bp, Homo sapiens
  misc_feature (1)...(596): n = A,T,C or G
ctgagaaatctaggtggattcatattcgtaatcattgattaacatgcacatttgggtttgcacatttttgtttatcatacatttttctccgttttctattaaagaacatgctctaggggaactattaatagcccaccagtcgggtaggcagcattcaatccttctatgccttctttcgccacctgttgaggtctttcttctgaaacaaagaagaaatagacaaatcagacttgccctcttggaaatgtggtccagatttctctactcccaagctccaaaaaaggcatacattggatgggctagatcaactcctcctgagagccataaatccgccaagagttgttttccatgtaagggtgtgggtacaatggggaacgcctgatgttggaggaaagcaggaggactttagaagtggagttgcattctaatctctctgccgcttcaactatgtgacctggggcaaatgatataaactctatgaacctctttccttatctttacctgcccnggcnggccgctcgaaanggcgaatttcaacacacctnngcgccgnttnctatggatccaactcggtaccaaccttggcgnaatcatgg

SEQ ID NO: 616 - DNA, 214 bp, Homo sapiens
cgcgcggccgtggaaggtcagcgccgtaatggcgttcttggcgtcgggaccctacctgacccatcagcaaaaggtgttgcggctttataagcgggcgctacgccacctcgagtcgtggtgcgtccagagagacaaataccgatactttgcttgtttgatgagagcccggtttgaagaacataagaatgaaaaggatatggcgaaggccacccag

SEQ ID NO: 617 - DNA, 149 bp, Homo sapiens
ctgtgggcggctcctggtgctaacaacaaagttccacttccaggtctgcctggttccctccccaaggccacagggagctccgtcagcttctcccaagcccacgtcaggcctggcctcatctcagaccctgcttaggatgggggatgtgg

SEQ ID NO: 618 - DNA, 440 bp, Homo sapiens
  misc_feature (1)...(440): n = A,T,C or G
ttttcacaagggcttctgaagaccttaagactnatatggttgtggctaatacaatggaagactttcagaagatactagattctggaaagattgttcagattccattctgtggggaaattgactgtgaggactggatcaaaaagaccactgccagggatcaagatcttgaacctggtgctccatccatgggagctaaaagcctttgcatccccttcaaaccactctgtgaactgcagcctggagccaaatgtgtctgtggcaagaaccctgccaagtactacaccttatttggtcgcagctactgagggatgaacgaaagccccctcttcaactcctctcactttttaaagcattgatattaagtatcttctcagatacagaccgttttatgattttttacctcggccgcgaccacgcttaagggcgaattccacacactt

SEQ ID NO: 619 - DNA, 595 bp, Homo sapiens
  misc_feature (1)...(595): n = A,T,C or G
ccagctctccacgctgctcggcatctgcaatggcggcctccagggaagccctctggcctttgaggccctcaatctcagcctggagccggctgatgttccggttcatctcagagatctcagtctttgtgcgccgcaggtcatccccgtgcttcccagccaggctctgcagctcctcatacttgatctggtacatgctctcagcctcagcccggctgcggttggcaatatcctcgtactgtgccttgacctcagcaatgatgctgtccatgtccagggagcggctgttgtccatggacagcaccacagatgtgtccgagatctgggactgcagctcccggatctcctcttcatatagctgcctgaggaagttgatctcgtcggtcagcccttccaggcgagactccagctctaccttgtcatgtaagcttcatccacatccttcttgatgaggacaaattcgttctncatctctgtaccttattgatctcatcctcatacttgntcttaagtcctccaccacccctgatgttgcaactccnctcacttnncttntctggccaaattcagtncactnggcggacacctaggnaatcac

SEQ ID NO: 620 - DNA, 577 bp, Homo sapiens
  misc_feature (1)...(577): n = A,T,C or G
tccctctgtggaagatattcaaaagccacaagtggtgcaaatgtttatggtttttgtttttcaatttttattttggttttcttacaaaggttgacattttccataacaggtgtaagagtgttgaaaaaaaaattcaaatttttgggggagcgggggaaggagttaatgaaactgtattgcacaatgctctgatcaatccttctttttctcttttgcccacaatttaagcaagtagatgtgcagaagaaatggaaggattcagctttcagttaaaaaagaagaagaagaaatggcaaagagaaagttttttcaaatttctttcttttttaatttaaaattgagttcatttatttgaaacagactgggccaatgtccacaaagaattnctggtcagcaccaccgatttccaangtgcaatatcaaaggaangggcagcgtgatggcttaattggtttggattccaagaatggcttttccacctcggccgcgaacccncttaagggcgaaattccacnccacnnttggcgcgnnttnctatggatccaactttggnacccaaacttgggggnaatnatgg

SEQ ID NO: 621 - DNA, 330 bp, Homo sapiens
  misc_feature (1)...(330): n = A,T,C or G
ccgggcgggttgacctccgtgcctagtcgtggctctccatcttgtctcctccccgtgtccccaatgtcttcagtggggggccccctcttgggtcccctcctctgccatcacctgaagacccccacgccaaacactgaatgtcacctgtgcctgccgcctcggtccaccttgcggcccgtgtttgactcaactcagctcctttaacgctaatatttccggcaaaatcccatgcttgggttttgtctttaaccctgtaacgcttgcaatcccaataaagcattaaaagtcaaaaaaaaaaaaaaacttgggcngaaacnacnttangggnaa

SEQ ID NO: 622 - DNA, 324 bp, Homo sapiens
aaaaataatttctattcaaaatacatgcataattgattttacacctcattactggtggataatttatgtgatgtggattgctggtgtccagcatgacccataaacaggtcagaagaatgatggaatgttttagaataaactcctgcttatagtatactacacagttcaaaagatgtttaaaatgcttttgtatttactgccatgtaattgaaatatatagattattgtaacctttcaacctgaaaatcaagcagtatgagagtttagttatttgtatgcgtcactagtgtctaatgaagcttttacctcggcccgcgaccacgc

SEQ ID NO: 623 - DNA, 119 bp, Homo sapiens
ccaaaagtttagcatattctgcagcctcttctttatttttcttggtacgctgcttcttcagagcaatacgccgccgtttgtgctgcaggacacgtggagtaacaagacgctgaatcttg

SEQ ID NO: 624 - DNA, 301 bp, Homo sapiens
ctgagattgccaagccgggaagagaccttgctccaggtgtagctgcgttttccccagatcacctgtccttttcccctccgacaaggaagctgtgatttttctctggcctttagaggcaaagtgattccagataagtagattaatgtgtagaatatctcatctgtgttgttccagtgcagccctttcagctttccagagccagttagacttgttatgaggagctaagtgattggctggctctggagctcagtttcatagattatagcccagcgtacgagaagcacgagtcctatagttggcg

SEQ ID NO: 625 - DNA, 451 bp, Homo sapiens
  misc_feature (1)...(451): n = A,T,C or G
aaatttctttcaaaagtttatttagtatcaagcaagaggagactttgcttaacactacagaacatttcaagacttgagttacaaaagaataccacattatttgcacttgtaattggcttccctttttacgcatgttggcaagagaaaaaaaactagcatatggctgaaagataaaataactaaattctatggaaacctttaaaatgaaaggtgaggcttatgttaaaagaatagattaacatatttagtaaacctattttttgtttaacactagttaatcaaagttattttttttccttttgatgacctattttttcatatacagactggaaataacaaaattttacatgtctttttttttttttttttttncntnggccgnaaccnccttanggggaaatccnccccctnggnggcgttctangggaccaactnggnccaanttggggaa

SEQ ID NO: 626 - DNA, 478 bp, Homo sapiens
  misc_feature (1)...(478): n = A,T,C or G
tttttttacggtttttatttttcaatttttattttggttttcttacaaaggttgacattttccataacaggtgtaagagtgttgaaaaaaaaattcaaatttttgggggagcgggggaaggagttaatgaaactgtattgcacaatgctctgatcaatccttctttttctcttttgcccacaatttaagcaagtagatgtgcagaagaaatggaaggattcagctttcagttaaaaaagaagaagaagaaatggcaaagagaaagttttttcaaatttctttcttttttaatttagattgagttcatttatttgaaacagactgggccaatgtccacaaagaattcctggtcagcaccaccgatgtccaaaggtgcaatatcacctcggccgcgaccacgctaaggggcgaattccacacacttnggcgccgtctagtggatcccaactcggaccancttgcgtaatcatggcatact

SEQ ID NO: 627 - DNA, 277 bp, Homo sapiens
aaactggacaacaaatccagcatttcaagtgccagaagtataactttctaaggagagaagggttgtcacattataaaatctttaggaaaatgtgaactggaaaacgcttcggtcagttttagtgacatagcctgtgatgatgggtctggtgactattattgcggaccgtggtacccagttttaggaatgtggagaaaggaattctgttgattccgttgaggaatctgtagcgtatgcattcgttctgttaagagcaaatctaggagaagtgcttcag

SEQ ID NO: 628 - DNA, 322 bp, Homo sapiens
aaacacagcgtttgaggcaaacagtagcaacagcagcagcaaatgcaccaaactgacgaaaagacccagatattttcctcactcatagtcagactgttgtgtctcaccccttacataacatccaagtgagatttctcacagtgctaccttggcaacaaactaaaaatatctagacaaggtcttggtttaagccttattaaaaaagctttctttgtgattatctggtatctggtttggtctccagaaaatacatagacttggagataggtaggcctcacaggacttcattctatatctttacagcatttgcaatcaaaactgg

SEQ ID NO: 629 - DNA, 496 bp, Homo sapiens
  misc_feature (1)...(496): n = A,T,C or G
aaactctgtgacttttcctggttcaaaaggacagtcatggacagcagcagaggagtgggggtctgaaaaatgtaatctttgtgtcaaggcactctgtggcctcacaactgcccccctgtcagagggatgctgccttccagccctaaagacactagggcttttcaatggacggggtgttgaagcagccagatggtaaggtcttcctgatgtcctccagattgcgaatgtccttcatgatctcctcgatatctcggttatagtccatgatggcagcctcctgcttcttggcttcattctccaggtcagacactttcctatcaagatcgctgaccttcatttcatctttggctttgtttagggtgccttcaatctcgtttagcttattcaggtccactgtatccagacctgcccgggcggccgcaagggcgaattccacacactnntggcgcngtctagtggatccaactcggaccaancttggcgtaatcatggcata

SEQ ID NO: 630 - DNA, 459 bp, Homo sapiens
  misc_feature (1)...(459): n = A,T,C or G
aaaattcttactgtttatttatatattgcatagctcaaaaagtttgaaaaaatgaagttttaacaggaagncantaaatgctcatagacccccttgtctctagcacttggagtccttagagatgggaatcttgacagcagaatttcagatgtttcaatcacttgccaaggaagtgccacacttgctcttcttcattactttctttatttggtgaagatgataccgattcaactaatgatcttgcttcctcttgagtgcaacggaaagggctatcagatatcttgcacgtttgtgcaatttatagctcctccattacacttcttcataagcaatgctttccaacattgatgagtggatttaataacttcaagagcaaaagccttgtttttgaattctccattaaaagcaaactggttttctggttttcccctgcccgggcggncgtcgaaagggcgaatt

SEQ ID NO: 631 - DNA, 66 bp, Homo sapiens
  misc_feature (1)...(66): n = A,T,C or G
actactatatggcgnattgnctnctngcatgcnatcttgagtattctatacgtgtcacctaaatat

SEQ ID NO: 632 - DNA, 693 bp, Homo sapiens
  misc_feature (1)...(693): n = A,T,C or G
aaaagtcacaaatcacagtgggagaatgccaaattgctttagcttggaactactgaagacgcacatagcatttattataaggcctactcttaggcagttcactctcaaagcaatgaaaataatctcaaaccaaacattacagtgggtttgaagcgttcctacgtttcttccgagcaggtcagttttacatttgctacacagcattccccacgaatgcctggtaattctatacatttgattctttaataaacactaaactaatagatcatagaaaactaaaagcttagagaaggtgcctccagacatatttacataaataacgtacctcacaagaaagaccaagatctcattagcggtggaatgctttttcccaaggctgggtccatgcctcatttgtcaaattaaccccatttgaggagaaatttgagtttgtggttcatgggtttttgaaaaaaaaaaaaaaaaaaagggatttnccccttgnaaaacntttttaaaataatttaaaacccaagggttcccnggtaaagncccaaccctnttaaaaaaaaggggaaaacctttgttcctttaactttttaacatttttttccctaccttaaaggaaaaaaggtcccatcccggncccttaaaaaagggggaaaaagncaaaggacgggnggccaaataantnccccccgggcctnaaggaat

SEQ ID NO: 633 - DNA, 638 bp, Homo sapiens
  misc_feature (1)...(638): n = A,T,C or G
ccattcctatgcatgtctgggaggaccacagccctggtgtggagcactgacaggtttgactttccaccagaattgcttgctcagcttaatcccataatattcctttcccttagatttgttttctgtctcggtaactttttctctctgcatataaaatttcatgactaaaataactttaaagtacagagattgtattttgttgaaggaatgcattgggggggctttgggcagacttagcaaaatgtttgtatagcaaaaatgttttcttgctaaaaactgatttgcaaacttgaaagtctagatgtgtgtaggaagattttaaaattcaggcaaattggtctctaaagagaccaattttgcttcctttgtcttggttccaataaggatttantaccaaaaagttcaaaaggctggcttnccanaanaattgtacatacttctctgaacccccaaaancaagggaaaaaatacctctaancttattatttatctcaggggtaaaaactaactaccttatatttaaataaacanccctaaattaatttatttaattttggngggggggcttnaggaancaatttnaggggggaaaaaaaaggntttccaaatttttaangaaaaaacaaaaaccccccaca

SEQ ID NO: 634 - DNA, 154 bp, Homo sapiens
  misc_feature (1)...(154): n = A,T,C or G
aataactttttatttgacatctacaagattttggcatcttgcagctttttaccaggtttatacaatctcgatttttcaatagtgcaacctgtggaagcaaaaaaaaaaaaaaaaaaaaaaaaaaaaaaaaaaaaaaaaaaaaaaaanantaaaa

SEQ ID NO: 635 - DNA, 326 bp, Homo sapiens
aaacagaaagtagttttattttttctaaataggattttgatcacaaaaatgctggtgattcaaacctttaaaacagaagagcatacaacctaagaaaaatgcaaaacaggctacaaacctgtacatcatgttactgcactgaatactgtaggcaactgtaacataatggtatttgtatctaaacatagaaaaggtatagtaaaaatacagtattacaatcttatgagactgccaacatatacgtggtctgtcattgaccaaaacatcattatgtagtgcatgactattaaaattgtgcaaaacaaacccctgtatccatagtgttt

SEQ ID NO: 636 - DNA, 190 bp, Homo sapiens
aaatgaagtgattctaagatttggtttgggatcaataggaaagcatatgcagccaaccaagatgcaaatgttttgaaatgatatgaccaaaattttaagtaggaaagtcacccaaacacttctgctttcacttaagtgtctggcccgcaatactgtaggaacaagcatgatcttgttactgtgatatttt

SEQ ID NO: 637 - DNA, 84 bp, Homo sapiens
  misc_feature (1)...(84): n = A,T,C or G
acatcacctaaaaaaggaaactgggtcctacggcttggactttccaaccctgacagacccganagacaaaacaactggttcttg

SEQ ID NO: 638 - DNA, 413 bp, Homo sapiens
  misc_feature (1)...(413): n = A,T,C or G
ctgcaaacaccctgggccagaatttcttaaaacagctacntgacaaaaacaatgctattgacatccaataatgctaaagcctgggtaccacccaggctccactgactgtggtttccaaacatctctccactgactgtggttttcaaccacaaggaaaggaaaatggaatattctttggntcttccagcctanacacaactcctgacctaanacattgagtggagagtcctaaccctttggaagttgaactttctgctttcttcctgggactttggaactgagtttgaacaaaggacctgccatcatgctgcccatggattttnggttaacccttgganaaatnttgtcctccttttctgacaaactntttttggacctnnggcgcgaccccccttaggggggaattncccccc

SEQ ID NO: 639 - DNA, 356 bp, Homo sapiens
  misc_feature (1)...(356): n = A,T,C or G
cgaggtcctgggctcgcctggaccacaagtttgacctgatgtatgccaagcgtgcctttgttcactggtacgtgggtgaggggatggaggaaggcgagttttcagaggcccgtgaggacatggctgcccttgagaaggattatgaggaggttggagcagatagtgctgacggagaggatgagggtgaagagtattaacctgtgtgctgtacttttacactcctttgcttggaactgcttattttgtctgnaatgctattgccgtaaattgttataaattgatgtttcattttacctgcccggcggccctncaaanggcnaattcnancaccttggcgcgtactaatggatccaact

SEQ ID NO: 640 - DNA, 162 bp, Homo sapiens
aaccacaaagctttacatcttcattttgactgttccatagcagaataaagcacttgaaaggaaacaagactccctttcacacatggattattataagtttcaatcctggtatctgtgcttgatttttatcagttttgtgtagatttttatgtttcatatttt

SEQ ID NO: 641 - DNA, 543 bp, Homo sapiens
  misc_feature (1)...(543): n = A,T,C or G
tccctctgtggaagatattcaaaagccacaagtggtgcaaatgtttatggtttttatttttcaatttttattttggttttcttacaaaggttgacattttccataacaggtgtaagagtgttgaaaaaaaaattcaaatttttgggggagcgggggaaggagttaatgaaactgtattgcacaatgctctgatcaatccttctttttctcttttgcccacaatttaagcaagtagatgtgcanaaaaaatggaaggattcagctttcagttaaaaaagaaaaaaanaaattggcaaagagaaagtttttcaaattctttcttttttaattaaaatggagttcatttatttgaaacaaactggggccaatggtccccaaaaaattcctggtcancnccccccatttccaaaggggccaattttcaaggaanggcaggcctnaaggcttatttggtttggnattcaangatggctttncccattcanttgcttttttaaacancctttttcaaaaanaaggacttggccngaacncccttngggg

SEQ ID NO: 642 - DNA, 417 bp, Homo sapiens
  misc_feature (1)...(417): n = A,T,C or G
aaacaagactccagtatgtgaaggttaattgctgtgctccacagatcttgtctattggcccctgtagaaagttaacctttgttgttttccttttataatttgcttattgcacaattgctttagggtaagtgaattatattaagatgccttgaaattatagcactccttgattaagaagctaaaatgtttctctcatttactccttaaacaaaagacttaaattagtttgggtcattatnctttatttgcagcatttggtttgtattagcgtaagagcaagtataggatatggagaggccctgctcatgaaacaaaggaggcccaggtataatacagtttctcctncctcttacttttntcccanttttccctgtngttcctttcccaattgtnnattcctnctggcccccaagggaa

SEQ ID NO: 643 - DNA, 565 bp, Homo sapiens
  misc_feature (1)...(565): n = A,T,C or G
aaatttcagagatattaagcagagagagagtgaaaaagtaacctttgttgttttatccaattttgcaagttatgtatagagttagtaatgtttaaacgaaagggacttaagccctgcctagctctgacaatggcaggaaaagaaaactcacaggtaactaaacatttatctagtaaggcatagaacaaattatattaagatagatagatgaaacattattcaatgattacttatgcctttgtatataggcctggtccagcgtcacatgaaagcagttcattttgactgtcatcttctcccaggtctgaagatggaactttggtcaacttgaatttgatgccagatatcaatattgactattaagatcagtaggcgtcaggattccctttcagatgagatacatgtcccaggagtcaaagccctgcaacttacaccncaagggtagttaatacatttcataaagaccttttttaagtgggntananggagctctcactgatgntaacatnagntgggggggggaactgagttatnattgtgganactcccgcggcgnctaagggaa

SEQ ID NO: 644 - DNA, 331 bp, Homo sapiens
  misc_feature (1)...(331): n = A,T,C or G
ccaccccggagatgacacgaggctcacatgactctagacacttggtggaaagtgaggcgagaaaaacaatgacttgggccaattacacgactgcaaagctagagctgccaacagggctccagggagcttggcttctgtagaagttctaaggaagcggtacgaactccacggcggtggggcgctaactagcagggacccctgcaagtgttggtcgggggcctcgagctgcctgagctgacacacctgcccgggcggccgctcgaagggcgaattccaccnccctngggggcgttactagtggatccgagctcggtaccaanctttggngaaa

SEQ ID NO: 645 - DNA, 333 bp, Homo sapiens
  misc_feature (1)...(333): n = A,T,C or G
cgaggtaaaaagaaaggccttacatatttattactgaatccagccaaccaacgtgttcataacagattcagagaggaaaacacgtcgaaatctccagatagtggtgacattttcagcttgatatggtaacatgatcgtgaccttcaaacagcataaatatgtgtgccntctcatgtgcaattccttatanacccagctnggttcttctccaatgtctccttttggagttgtacctgattttactaccaggtttcatctgaatcccctgggggatgggacnattttgcttttnttttttggacctgcccgggnggccnttnaagggnaaattcc

SEQ ID NO: 646 - DNA, 326 bp, Homo sapiens
  misc_feature (1)...(326): n = A,T,C or G
ccgagaactattcctggcactttttcgaaagtttgatgagagatgccagccccgctctttccttcgtgacctggtggagaccacccacctcttcctcaaaatgttggagcgattctgtcggagccgtgggaacctggtggtgcagaacaaacaaaagaagagaaggaagaagaagaagaaggtcctagaccaggccattgtttctggtaatgtcccatctagcccagaagaagtggaggctgtgtggacctgcccggccgnaangggcaaattccacccnccttggccgccgttactagtggatccgagctcggtaccaagcttgg

SEQ ID NO: 647 - DNA, 271 bp, Homo sapiens
gaagtgcattgggcttcaatctctgaacactgtagacccattagaagactgttccgattgttacaaattgtagtgcctgaaaacactcttaagctgattgtcttaacaaaatgaaagttctccaaagacaaaacagaacaattattataacaaaataattatggttgaaatgtctgtggttccttggaaatgctgcgctctttgtgtttttccatcattagtgcagttggaatgaatgtgtataggtcagaggtcctcgtgttcacatttt

SEQ ID NO: 648 - DNA, 370 bp, Homo sapiens
  misc_feature (1)...(370): n = A,T,C or G
aaaatgcaaagaaaattaactttcaatgatatgttcagggactggcactaaaaaaaattttcagactgcaaatgagttatacaaatgaaaatatcaaatggagatccagttatcaaaatgaaagcactcaacatattaaaagttcacaagtatttgtattgagcacattacaaaagtcagcttgctaactgttgtgattttaaagaactattgcagaagtctgaagaaaatagatttattagttaacttataaagagattaaagaggntgaacaggttttaaaagaaaattggggcttttttaaaaaggtanggttttaaatttcccattttgaaaaaataatggtggtggtttggttttttntaaaaaa

SEQ ID NO: 649 - DNA, 480 bp, Homo sapiens
  misc_feature (1)...(480): n = A,T,C or G
ccacggggactgttattcgcaagctggttttctagaacctgttagctggaagcatggngagcaccatttctggacgctcaggccgtgtcgggctttcagtcatntccaccacacaggtacagcagcgctttttggtagtcgcccttagngtnttgctggatataatagtacagggacttgccgtactttttnttganttcaaacctanttttcaacatgtccacttcactgcggnaaaccatgattttgatcaggaccttntttcgcgtccccttgcccttcatggagtcatacanccnatcagcaaaatacagggcttggttctgaatgcactgaaccaggttcaggaaagcatttcccaggctcctttaacctctttcctgatcttttccaacatggtcataanggntggaactctttgtacctattaacttgccccggggggcgnttccaaagggggggaaattnnncccccccccc

SEQ ID NO: 650 - DNA, 405 bp, Homo sapiens
  misc_feature (1)...(405): n = A,T,C or G
aaaaaattagttgctttttatacagctatacaaagttcttaatgtttctttggcaatggaatataatggaattttacaactatataaaaaagttacctttgcctaagaaacagtatttactgtgtgtacatagttgactgacaaaattctctaccatccagcaccctaattaattgacgaaataagctacctcatattacaggattccccaaaagaaaggaggaaaaagacacacacatacacacacacacacacacacacacacacacacacaaccttntgtggctcaaaacacagtatcacggccctatctgcangcaacttgcaattgcacctcgcccgngaccactctagggcgaattccagcacactgcggcgtctangatcnactcgtccaacttggga

SEQ ID NO: 651 - DNA, 638 bp, Homo sapiens
  misc_feature (1)...(638): n = A,T,C or G
caagatggctgtcttcgccttagtactcgtgtgaagttggcagggacggttcctgtcatcttcttgggcttatttggtgtgctgttgaaggggggagactagagaaatggcagggaacctcttatccggggcaggtaggcgcctgtgggactgggtgcctctggcgtgcagaagcttctctcttggtgtgcctagattgatcggtataaggctcactctcccgccccccaaagtggttgatcgttgggaacganaaaagggccatgttcggagtgtatgacaacatcgggatcctgggaaactttgaaaagcaccccaaagaactgatcaggggggcccatatggctttcgaggttggaaagggaatgaattgcaccgttgtatccgaaagaggaaaatggttggaagaagaatgttcgntgatgacctgcacaaccttaataacgcatccgcttatctctacaaacacttttaaccgaccntgggaangtttccaatagaaanaaaaaaacttgaaaaacnttcggnaaaangnttcatcttttcccccttgaaaaaagggaaacttgtnctttttccctgggaaggnaaaccggttttggaatttttctcttggaaaaaaantgggggtttttttt

SEQ ID NO: 652 - DNA, 433 bp, Homo sapiens
  misc_feature (1)...(433): n = A,T,C or G
aaaattttagaagttaagacttacgactacctcagtatatgccattcctaatagaaggaggtatgacggtttcaaactcgtgcagagctgcattttcatttacaagtctctgtaggcactttagaagtgaagcttggcttcaaagtacaaacactgggggctttggctcaaccttttaatataaaaaaattcactgatgtacaaaaatttgaaagtgtgacaatgacaattatgaaatcctgtgactgaaagtcccctcgagtgcactctgtgggtgcacatgcgcccgccacacaaactctggcatggaaacataaactaatgcaaaccatgctcccagaacccacacgtgtgtctcattccccaatncagacanactcgcggaccctagggaatcaccactncgcgtctaggtcactcgacactgggtatg

SEQ ID NO: 653 - DNA, 566 bp, Homo sapiens
  misc_feature (1)...(566): n = A,T,C or G
ccataaacacagaagatggttttggctttacattgacacatttctgtgtgtcaatgtagaagagaaaagaagtttaattataccttttaagcaggcaaaccattataataaactgctttagaaattactttaaaattatacacgtttggaacaacagattttttaaaaaatgaagtttggtgttatgtcagcattttaactatttttgctatagcgaggcctcctcatatattatcataatttatcatagtttaaatagtgaatcatattctgatattctgattaataatcatattaattttgacaatgattttagtttttgaagttttagactgcatcttaaaaaaggccataatctctttaaatacctcatcatagaatattaacttttaataaaaggttattttgatattggaataaggacatggtaccaatatctgttttacctggaagcatgaaaatgtnttaaaaggnaaataaaaannccaaagtagtgttttacctcggccgcgaccnccctanggggaattcccccccccnnngggcgttnctatggatccaactng

SEQ ID NO: 654 - DNA, 234 bp, Homo sapiens; identical to SEQ ID NO: 397

SEQ ID NO: 655 - DNA, 169 bp, Homo sapiens
aaaaccctgaaaatatttaatacagaataaaaacaataagctcaaagtacatgtttcactataatagacaccatattcatgaacctgggtttggttttggcaacacataatttttggtttaaaagtgaacaatgaaaacggatgtttcacattcaatatcctagtcttt

SEQ ID NO: 656 - DNA, 601 bp, Homo sapiens
  misc_feature (1)...(601): n = A,T,C or G
tctggatcttccaaaatatacagaaaaagaaactctacgctctaaactgatccaagctattgatcacaatgaaggcttcagtttaatataactttggagttataactattcagtttagtgcaaaagcattaaactatttgtgtttttcttgtggtgatgaattcagcaaggtgacagaggtactattataattcttacttgcagaatgttcaatctacgagtgttcatggaagccaaaaaatattaaaggaaaatgaacaaactgttaatattattgtacagaaccatggattttttttgaccatcttctaataaacatagcaagtattatgaatacattaaagttttactaacatgaattttaagagtttgcatatttcaaaaatgatctggtgtgagtgcatggaaatattgcttaatttttcttcaatcattgagtgaaaaacctttaactttggcctgcaatagcatttgatattttttcattttgtaaanaaaggtaantttgnaataaaanattattttttgataccantccantttntntggtgtaattgacttgaacaaaatttactttggcgggaacccccttnggggaaat

SEQ ID NO: 657 - DNA, 224 bp, Homo sapiens
ccatctatacaccattcttaccacacaattgacaaatgatgaactttctgagaaggtgaaaaactatagcaacctccttgctttctgtaggagaattgaacagcactattttgaagatcgtggtaaaggcaggctgtcatagagttatgtgttagtctcaggagtcttaacttttgaaatatgttttacttgaatgttacattagatattggtgtcagaatttt

SEQ ID NO: 658 - DNA, 296 bp, Homo sapiens
  misc_feature (1)...(296): n = A,T,C or G
ccatggaagaagggcaggcatatggagtatgaatgcccctacttggtatatgtgcccgtggtcgccttccgcttggagcccaaggatgggaaaggtgtgtttgcagtggatggggaattgatggttagcgaggccgtgcagggccaggtgcacccaaactacttctggatggtcagcggttgcgtggagcccccgcccaaacctcggccgcaaccacnctaagggcaanttccancacccttggcgcgttactagtggatccnanctccgnacccaactttggggnaanatggggg

SEQ ID NO: 659 - DNA, 532 bp, Homo sapiens
  misc_feature (1)...(532): n = A,T,C or G
gcccaaacatctccttgcatttttgttggctgaattgggtacaagtggttctatagatggtaataaccaacttgtaatcaaaggaagattccaacagaaacagatagaaaatgtcttgagaagatatatcaaggaatatgtcacttgtcacacatgccgatcaccggacacaatcctgcagaaggacacacgactctatttcctacagtgcgaaacttgtcattctagatgttctgttgccagtatcaaaaccggcttccaggctgtcacgggcaagcgagcacagctccgtgccaaagctaactaatttgctaatcactgattttgcaaacttgttgtggagatgtggcttggacaggtttgccatcagaagtggatatccgttgtattaaaaacaagataaaaaactgccaagatttttggcnagtggtggnctgaatccttgcaagaccttatgctcaactgttgacatctcttgctcttaccctgtaaaaaactgaaatgggnaagaggnttttactcgcggacccta

SEQ ID NO: 660 - DNA, 626 bp, Homo sapiens
  misc_feature (1)...(626): n = A,T,C or G
aaattcttgcattacacttttctttttaaaccaatcttccaggagattaatcaatgaaatttataagttttatcaacgtataaaatttttttcatcttctgggactcatagaatacaatctgtgtttctgaccagttgaggtagttaaaatagggagggcttttctaatttcgtatttgactatttcagaaagaaaggttatcttttactggtgagcacagtcattgctctgcagatgggctaggattcaaagaatataacacagtgttgttatcataaagagtgttgaagtttatttattatagcaccattgagacattttgaaattggaattggtaaaaaaataaaacaaaaagcatttgaattgtatttggtggaacagcaaaaaaagagaagtatcatttttctttgtcaaattatactgttccaacntttggaaataaataactggaattttgtcggcacttgcactggttgacaagattagacaagaggacncctatggagtaaatttttttggtgggatttcanatnagtccgttataaangaaacaggccacgtcccnccaatnttgtaggnctgcccggggccnaagggaantccccccctnnggggnttttngcca

SEQ ID NO: 661 - DNA, 344 bp, Homo sapiens
  misc_feature (1)...(344): n = A,T,C or G
gaaggccttcgataggcactgcaacatggtgctggagaacgtgaaggagatgtggactgaggtacccaagagtggcaagggcaagaagaagtccaagccagtcaacaaagaccgctacatctccaagatgttcctgcgcggggactcagtcatcgtggtcctgcggaacccgctcatcgccggcaagtaggggccgctgtctgttgacagaactcactcctctgtcctatgaagaccgctgccattggtgttgagaataataaagctctgtgtttttttctaaaaaaaaaaaaaaaaaaaaaancctttggccnggaacnccttttgggggaattccnccccct

SEQ ID NO: 662 - DNA, 545 bp, Homo sapiens
  misc_feature (1)...(545): n = A,T,C or G
ccggacatcccaacgcatgctcctggagctcacagccttctgtggtgtcatttctgaaacaagggcgtggatccctcaaccaagaagaatgtttatgtcttcaagtgacctgtactgcttggggactattggagaaaataaggtggagtcctacttgtttaaaaaatatgtatctaagaatgttctagggcactctgggaacctataaaggcaggtatttcgggccctcctcttcaggaatcttcctgaagacatggcccagtcgaagcccaggatggcttttgctgcggccccgtggggtaggagggacagaagagacagggaagagtcancctcccattcanangcatcacaagtaatggcacaatttcttcggatacttgcanaaaatatggtttgtagttcaacactcaagacnaacttattnttangataactcttaangcaacttattcatcctcactttgcctcttacncatgtaaaagattatttnaacngaggagatgntgtggacctccgctggacctaaataccttgtactact

SEQ ID NO: 663 - DNA, 493 bp, Homo sapiens
  misc_feature (1)...(493): n = A,T,C or G
ccactgcagcaccattggcaagagctaaaagctggacacaagccggatggcccgcggctggggagggtcaaatgaactacaatccatccacatgaaaactgggcgctgctacaggaaggaggctccttgtgtgccatcagggagaggccttggcgccagctccctaggaaggcaggctgccaggcagtatgtccagaaggagctcactctggtgaaaacaacaaacaagccatcaacactggctgtgcaggcaaaggcgcagagtccagaaggaatagtcctgactgttagcagagctaacagtctttcctgctctctgtccatctgtgtgtccttccattcatccatctcttctgctgganacacttcangggcgcactnatgtggggggggggggctttcaccttgnattttatatctttggactgctttgttcacactaaacatcaaccctttactcggccgnganccccttngggggaattcccccccc

SEQ ID NO: 664 - DNA, 329 bp, Homo sapiens
aaagttgtgagtttttattcaattttttgaggcctcttatttcctgaggctacatttttaagtattaaaagttaggcaactacaaccaaggaacttggtcatttgttatttgtaccaaatgttcacaaacttattcgggcgtggtggtgcctgtttgcaatcccacctattggagaagctggggcgggagagtctcttgactctagaagacggaggttgcagtgatccgagatcgcgccactgccctccagtcagagtggcagagactcctggggcgggagagtctcttgactctagaagacggaggttgtagtgatccgagatcgcgc

SEQ ID NO: 665 - DNA, 364 bp, Homo sapiens
ccagtttggtgtcggtttctattccgccttccttgtagcagataaggttattgtcacttcaaaacacaacaacgatacccagcacatctgggagtctgactccaatgaattttctgtaattgctgacccaagaggaaacactctaggacggggaacgacaattacccttgtcttaaaagaagaagcatctgattaccttgaattggatacaattaaaaatctcgtcaaaaaatattcacagttcataaactttcctatttatgtatggagcagcaagactgaaactgttgaggagcccatggaggaagaagaacagccaaagaagagaaagaagaatctgatgatgaagctgcagtagagaaaa

SEQ ID NO: 666 - DNA, 173 bp, Homo sapiens
gtgctgtgccacctggtgccgacaagaaagccgaggctggggctgggtcagcaaccgaattccagtttagaggcggatttggtcgtggacgtggtcagccacctcagtaaaattggagaggattcttttgcattgaataaacttacagccagaaaaaaaaaaaaaaaaaaaaa

SEQ ID NO: 667 - DNA, 200 bp, Homo sapiens
  misc_feature (1)...(200): n = A,T,C or G
aaaaaaattcccccctttaattgaccaaagtaaagccatgacatttcatttggtaacctgtttagaattataaaaatcatttcatttggcccagcccatactgcccaagacaaaacttccagacaattctgatgccatccagttttgttcttacaaactgcatattaaaaaaaaaaaaaaaaaaaaanttttcancnccc

SEQ ID NO: 668 - DNA, 235 bp, Homo sapiens
ctgtcaacgaaggcttgaaccaacctacggatgactcgtgctttgacccctacacagtttcccattatgccgttggagatgagtgggaacgaatgtctgaatcaggctttaaactgttgtgccagtgcttaggctttggaagtggtcatttcagatgtgattcatctagatggtgccatgacaatggtgtgaactacaagattggagagaagtgggaccgtcagggagaaaatgg

SEQ ID NO: 669 - DNA, 520 bp, Homo sapiens
  misc_feature (1)...(520): n = A,T,C or G
aaagcgggagatacatgaggtgggaagcttgttacaggagccggaaacaaaggcagtaaattattttgtgacatgtcttagattttgaggaaaaccggaattgcaacttaggttttatctactttaggaccttgcagcagcatggcaaaggagacaggatcttacaggactttacaaagtatgtttacaaggaatctgaattgggagtgtagataaggtccactggtcacagaaaaatgagcagttaacattcctttattttagtttcaggggcgggggaagggagagagggagagaagatacagggaaacttacagcaaatttttcactgtttatagctttcttggggaagaaaacacatgcacgaatcctggtgttaggaatattttaagcgtatatcttcaatattattcatccaggactgaagtaagtcctgatgcaggaaatgaatgagtttcacagctttctgacccctcttgcccaggaacccagactgccgggcgggcgctcnaaaggggaa

SEQ ID NO: 670 - DNA, 363 bp, Homo sapiens
  misc_feature (1)...(363): n = A,T,C or G
aaaattatctacactgaggttacataactttggtaaaagttccaaagttcactaatatattcctagggggcactaaaaaaatctacaactttatttaaataattttcaaggctacttactttcttcattgcattcactctccacgaattcataaaatatgcatggacacctatcgattcaaagtacaccataaacttactgtaaaaatccagtattacttaaaacatctctactatcattcaaatggtttaatctgacttaatgggcagtttgctcaagtgaaccacctgctgctcacttaattctcttcacattaatcttaatttacctgcccgggcggncgctcnaaaaggggaanttccc

SEQ ID NO: 671 - DNA, 153 bp, Homo sapiens
  misc_feature (1)...(153): n = A,T,C or G
cctgcttcacttgcagataagtttattataattctccagaaatgtgtaggatgtgcattagcaaattgcactgtacttttcactccagcctgggtgacagagcaagactcccgtctcgggggcttaaaaaaaaaaaaaangctgtntntaaat

SEQ ID NO: 672 - DNA, 725 bp, Homo sapiens
  misc_feature (1)...(725): n = A,T,C or G
ccaactatgcctctcagaacatcacctaccactgcaagaacagcattgcatacatggatgaggagactggcaacctgaaaaaggctgtcattctacagggctctaatgatgttgaacttgttgctgagggcaacagcaggttcacttacactgttcttgtagatggctgctctaaaaagacaaatgaatggggaaagacaatcattgaatacaaaacaaataagccatcacgcctgcccttccttgatattgcacctttggacatcggcggtgctgaccaggaattctttgtggacattggcccagtctgtttcaaataaatgaactcaatctaaattaaaaaagaaagaaatttgaaaaactttctctttgccatttcttcttcttcttttttaactgaaagctgaatccttccatttcttcttgccatctacttgctttaaattgtgggcaaaagaaaaaaaagaanggattgantcanaacanttgtgccaatacaagtttcanttaacttcctttcccccgctncccccaaaaaatttgaaattttttttttaacccctttttaccccccntttttggnaaaaaggtnaanccttttgtnnnaaaaaccccaantaaaaaattgaaaaaaaaaaaacccttaaaaattttnccccnccttgggggttttgaaaattttcccncnnagggaagttcccttggcnggacccccntngggggaa

SEQ ID NO: 673 - DNA, 363 bp, Homo sapiens
aaacatctcacatatacaaaataggtacaatttaatttttctgcttgcccaagaaacaaagcttctgtggaaccatggaagaagatgaaaatgagactggcaaagaacaaatgctgaatctgaagaagaggacaactttgggcaaataatctgcatacttttaattgggaataagatggaaaatatgaatgctaaatcaaattttttaaaaaatacaccacacgatacaactcaatacaggagtatttcttctcaaattcttctagcaccatcaacattcttcaagtatctgaaatactattaattagcacctttgtattatgaacaaaacaaaacaaggacctcagttcatccctgtctagg

SEQ ID NO: 674 - DNA, 295 bp, Homo sapiens
ggcaggtccctggactagtgcagtccttgccctcagccccagaccagagatgggtggtatatgccatgtggggtgggtgatgtcagtagataaaagtgtgagagaaggggtctccagggaagagtcacaggctgttggacacagcctgggtggcagagggcagggtcatcaccctctagcatcagtgcctgctcctgcctgccctggccctgaggctccaccacttcttcctccacccaggacctaatgtacgtgtgttttgttttttgttttttacctcggcccgcgaccacgc

SEQ ID NO: 675 - DNA, 360 bp, Homo sapiens
  misc_feature (1)...(360): n = A,T,C or G
aaaaaccatacatcctttttattgttaagtcataaagaggtatcaaaattaaaagcaaaaattacagggtaagacttaacaaaactactaggagcgtcaaaggaagtgaaaatgggactaggcgcggggcaatatgaattaatgaacatgggaaggacaaggatggggagaacagtgagcatgtgctgaagatactaggggagaggatctggtgaaaaatttgatcttagacaagcgcctaggtaaagaaataatgggataagatttcacctcggcccgcgaccacgcttaaggggaanttcccccccccntggggcgcgttnctagtggatccgagctcggtaccaagcttggcggaat

SEQ ID NO: 676 - DNA, 208 bp, Homo sapiens
ccatgtgtgtcaaagtcagggaatccctcctcctgggagccaagaggaagtctctcaaaactagaagggaaaggtgttttctccacatcaatccagctttggagacattctattagtgacatatgccccttcccccaaaaacaacaatgaagtgttctgtgtgctaacaacatagcttttaaaaaaaaaaaaagtaaaacaaaatttt

SEQ ID NO: 677 - DNA, 496 bp, Homo sapiens
  misc_feature (1)...(496): n = A,T,C or G
ataactgtcaacctgacacccgagctggctcaggtgaacgagtactgagaggagagaatgtacgtttgctttacccaccgccaccaagaaagcagtccgatgagattttttttttggaggggggagggtctacacagcaagagaacagaaatattgtgtctcatgaaggatcacanagttcagggggaaaatgtgacagcacacgcacaaacgccttcactggatcagccgctggaactgagggagtgagcttggggacttccttcgtcagcactggctttctgttttcacaagacagacgtctgtcccgctgctctctccccatctcctaccccacatcctgtcttagccgcagtctccanacccatgatgaactgtgatctgccgtggcctgccgtggtcctgccgtggacctgtccctaccatgaccttggacctnttgccttcaancanaggaaacccccaggganactcgccggacnccttaggggaatcc

SEQ ID NO: 678 - DNA, 570 bp, Homo sapiens
  misc_feature (1)...(570): n = A,T,C or G
gtagctggcggtcccgggtgctgctggttagtgtgctctgggggagggtccgagccagccgctgttttgccggaggagcccctcaggccgtagtaagcattaataatgtctttcatctttgagtggatctacaatggcttcagcagtgtgctccagttcctaggactgtacaagaaatctggaaaacttgtattcttaggtttggataatgcaggcaaaaccactcttcttcacatgctcaaagatgacagattgggccaacatgttccaacactacatccgacatcagaagagctaacaattgctggaatgacctttacaacttttgatcttggtgggcacgagcaagcacgtcgcgtttggaaaaattatctcccagcaattaaatggggattgtctttctggtggactgtgcagatcattctcncctcgtggaatccaaagttgaacttaatgctttaatgactgatgaaacaatatncaatgtgccaatccttatcttgggtaacaaaaatgacagaacanatccatcatgaaaaaaaactcccnnaaaaatttnggtttttggac

SEQ ID NO: 679 - DNA, 522 bp, Homo sapiens
  misc_feature (1)...(522): n = A,T,C or G
aaaagaatttttgctttctttctctctaaattttccttccgtgctttgatgcgggctcgtttctcacgttccagtctgagaaaatggtccacataaggcaaggcaaagaatcgtttcctattgtatcttttatttaggtgccaaggtataacccactgcttgaacttgtgccagatgattcttccaaagatgtctcttctccaagcaccaggtctagctctttcttgaccagtctgaagaagccttagggcatcttctctttcctggacaactttatctaatgcatccatggaatctactaccttatctaaccgctctggacttggcattggcaatctctgccgcttggcctcctgctctagggttagaagcatgtttctttctttcagtaagacataccaaaagtttgtgtaaatcttcattacttttttccttattgctgacaggtccatgctgctncagaatttactttttcttgcccccagttttttgggcatcaaaaaancctgccngcggccgtct

SEQ ID NO: 680 - DNA, 438 bp, Homo sapiens
  misc_feature (1)...(438): n = A,T,C or G
caggaagatggtggcccgcaaagaaaacgaaaaagtcgctggggtcnatcanctntaggntccanctcgttntgaaaagngggaagtncgtcctggggtacaagcagactctgaagatgatcanacaaggcaaagcgaaattggtcattctcgctaacaactgcccagctttgaggaaatctgaaatagagtnctatgctatgttggctaaaactggtgtccatcactacagtggcaataatattgaactgggcacagcatgcggaaaatactacagagtgtgcacactggctatcattgatccaggngactctacatcattagaagcatgccaaaacaaactggngaaaagtaaaccttttccctacaaaatttcncctgcaaccttaaacctgcaaaattttcctttaataaaatttnttgtttacctcggcggga

SEQ ID NO: 681 - DNA, 182 bp, Homo sapiens
gggggacgtcagagaaacggcgtcatgcccagccacttcagccgaggctccaagagtgtggcccgcccgggtcctccaagccctggaggggctgaaaatggtggaaaaggaccaagatggcggccgcaaactgacacctcagggacaaagagatctggacagaatcgccggacaggtggcag

SEQ ID NO: 682 - DNA, 427 bp, Homo sapiens
  misc_feature (1)...(427): n = A,T,C or G
aaatgaaattacaaactacccctccttgtcaaaaatccacatgaagttgatattggtgtttataaatcactctctcccagtccctcactggttccaaccttcaggtgataaaaattaggatgggatccatcctccctgtgctgacagtctggggtccccgcatgtatgcacaaacccgcccagcgtgcgcacacacgttcagaagaaatcttcaaaggaaccgagcgtttggagaaagtggcaagtccacagaatcagaggttacgaacacaccttcaataatattaatacattcctgtctttaaattccttgccatgtttccatcaaagtagagcacacattgttttccagaacctgggggctcgacctgggtgggacaccaggatgcagacctcggccgcganccccttaagggngaaatttccc

SEQ ID NO: 683 - DNA, 419 bp, Homo sapiens
aaactttggtttgaaaattgcagttacaaaacccaaatgagaggacacggacaaaaaagtaacaaaaagacagatgccctgaatcagacacatcgctaacaagcaagagatgaggagattccatttggtgttattccggcatagagcaagcggcaggctttgatgcagaagcttattgtagaattgttaagtgattttagtcgacaggatcacatacaaatcatttacaagccacaattagtttattatttacataagacatttctctttaaccaggttaattgtttttcttaaaatggcatagactcctctggttagtagttttattatgcacctctttcaaaactgaggctcctcatggctgtgtgttggaacttttttaaaataatgtttttctacattattactgaaatgcatca

SEQ ID NO: 684 - DNA, 509 bp, Homo sapiens
  misc_feature (1)...(509): n = A,T,C or G
ccagccacggtaaccacgatgggtccatcgctggatgggaccagaaagtgaatacgccgaggcatagggttgtagcagaaaaagaggtttcatcgtagggtcaccgaaggaggaaatgggaggaaacgtcaaatccatctccctgaggagtttggggctggggtttttaagggtttgggagtggagactggagtgtgggagatggttgattggtcgaagtgtgcagggtgggagtcatgggaagagggagacgaaagctgtatttttcattgcttgaatcaccattcctcttgtnggggggtctttcaaaacttggtttggtggtccggcttgtttttgcttggaaaattcaaggaatcttgaaaaaaacantctttaaagccaagttcttttaaaccaaaaaaaatctttaatgaattcntaaatggncaagaaaaatcccccatcttattttttacccttgcccccngggcggggnccncttttaaaaaaggggnggnaaatttttt

SEQ ID NO: 685 - DNA, 445 bp, Homo sapiens
  misc_feature (1)...(445): n = A,T,C or G
ccacctagcagggctcctctaaacacgcaactcagcgaggggacccccttcacctctggcaagagagctgggtagatcagaaacttggtgacacctggctagcacagagcaggctcacttgtcttggtcccactacccagattcctgcagacattgcaaaccaaatgaaggttgttgaatgacccctgtccccagccacttgttttgttatcatctgctctgcagtggaatgcctgtgtgtttgagttcactctgcatctgtatatttgagtatagaaaccgagtcaagtgatcatgtgcatccagacacactgtgtcacctgaccacagagcaaataccttaacaatctggaatgaaacttgtgaccagtgccnccctgggtggttntggananactgccgtnttntttttgaactcggncgngaacacccttnngggggaatt

SEQ ID NO: 686 - DNA, 332 bp, Homo sapiens
  misc_feature (1)...(332): n = A,T,C or G
gtccttaggcaccagtctttgttaaacaaaaccctttggcactattgtggttttctattctctgtctgaactctattcaaaagtatctttgctctcttgggccttttcttttactgttttgttttttttttctaatcttgctttcatactanccagtgtggggaaaaggtncaatatgtcaaagagatgagagagtgttatttcttgggcaattttctattagtgtttcttattttggacctcggccgcnaccaccctaagggcnaattccaaccccactgggngcgttactagtggatccnanctcggnccaancttggggnaaaannggg

SEQ ID NO: 687 - DNA, 575 bp, Homo sapiens
  misc_feature (1)...(575): n = A,T,C or G
ccaggaggggtctggctgggacatgccactctgggccatcagcttctggatccactcaaagtggtggctgatattggtgtagacaccgggccgattgggccgaccacagcccactccccagctcacgactccaatctgataccacagtccattcttgttacaggccaagggtccacctgagtcaccgaagcaggcatccttcccgccttgggcattgccagcacaaaccatgtctccaaagatgtccttgcggaaactgtacttgaggaagaggtggttgcacatagagttgtttatgatggcgacctgaacttcctggagggtgtggggagatggcaatgcctcatcctctttgatgtacccccagccagtcacccagcagtcttgtccggttctcaaacttaaatgtggaggccttggaaacagatgggcttggatgtgtttantgtaggtgacangtgcagacaacttcaccaangcaatgtcatagggtgaattcccangtagcganggctcanatanattttataccaataacgggtgtagnngactcggcgnnaccccttanggngaat

SEQ ID NO: 688 - DNA, 489 bp, Homo sapiens
  misc_feature (1)...(489): n = A,T,C or G
cattaggccagcaacgcttgtagaactcactctgggctgtaacgtggcactggtaggttgggacaccagggaagaagatcaacgcctcactgaaacatggctgtgtttgcagcctgctctagtgggacagcccagagcctggctgcccatcatgtggccccacccaatcaagggaagaaggaggaatgctggactggaggcccctggagccagatgggaagagggtgacagcttcctttcctgtgtgtactctgtccagttcctttagaaaaaatggatgcccagaggactcccaaccctggcttggggtcaagaaacagccagcaagagttagaggccttagggcactgggctgttgttccattgaagccgactctggccctggcccttacttgcttctctagctctctaggacctcgggccgcgaccacgcttaagggcgaattncaacacactgggcgggccgttctaatgggatcccaacttngg

SEQ ID NO: 689 - DNA, 584 bp, Homo sapiens
  misc_feature (1)...(584): n = A,T,C or G
ctgttatttatgtggctcatgatgcttattgagcaatctgcaaaaatagatttcctgtctcacacaggacagggtagatttccagcaagcataatcaaaatctccaagtcttttggtcaaattagagctgccaccatgcacgaggttttacttaaaggtgtttactgatgaataaactcacacttctgtgaactggttcttgcttcttgtgcagctaactctttccacctctctttgttctgctgaatgatgtccaccaggttgttcttgaaactcttcaggtccactgctgcaagggagtagtctggggaataggacccatcactcatggagccttttgtatttgatcgcttantgcatcaacaatgtgtaaccccacaatggtgggttgagctgcttgccacatangaagaantttcggcttttgaaggtttcctcttttaaaaagaaataacaattttcttntgttgantcttgtcaaaaaaaaaaaaatgtttgggaaccttgncccgggcgggcccntttaaaaagggggaaaattccaanncacctgggnggggcggttacttaanggggaacccaaa

SEQ ID NO: 690 - DNA, 196 bp, Homo sapiens
  misc_feature (1)...(196): n = A,T,C or G
cctcggggcttatacaatgagcagtgggctctaccttccaacaggaagtgcaaactaattcgaagtcacacttcaccaggagggagagatggtcttggctgaangcactttaatcaagggaacaaacccaatgccggaatttgncttctcttacttttataaatctaaanaccacttttttggaaaaccaacactg

SEQ ID NO: 691 - DNA, 365 bp, Homo sapiens
aagaattcacttgagtcctatgccttcaacatgaaagcaactgttgaagatgagaaacttcaaggcaagattaacgatgaggacaaacagaagattctggacaagtgtaatgaaattatcaactggcttgataagaatcagactgccgagaaggaagaatttgaacatcaacagaaagagctggagaaagtttgcaaccccatcatcaccaagctgtaccagagtgcaggaggcatgccaggaggaatgcctgggggatttcctggtggtggagctcctccctctggtggtgcttcctcagggcccaccattgaagaggttgattaagccaaccaagtgtagatgtagcattgttccacacattt

SEQ ID NO: 692 - DNA, 293 bp, Homo sapiens
aaaatccctcaaaaactgtttattatacaagtgagttttgagtcacgatgggcttatcggtaggatttctggtagcgagcgcgggcaccaggacctccaaactttttggactcgcagcgacgagggtcagctaccagcagggtccggtcatactggatgaggatgtctttgatctccttcttggaagcctcatccacatatttctggtaataggccaccagggctttggagatggactgacggatagcataaatctgggccacgtgaccaccaccctttacacggacacggat

SEQ ID NO: 693 - DNA, 230 bp, Homo sapiens
cctgggtttggatttcagaatcctagctccgggctccactcgtgtggcagcaagactgcttcgttccagcgtttagaaacacacctgtatttgattctcagccaggggagcactcgctgcactggtgggaggcggttgggaaagttgcaggaaaaccttagtcttccatccttctgacccatggtggaaattcacaccatggatttttaatggatctttgttctaggcag

SEQ ID NO: 694 - DNA, 566 bp, Homo sapiens
  misc_feature (1)...(566): n = A,T,C or G
ctggtaccaaaacagagatatagaccaatggaacagaacagagccctcagaaataatgccgcatatctacaactatccaatctttgacaaacctgagtaaaacaagcaatggggaaaggattccctatttaataaatggtgctgggaaaactggctagccatatggagaaagctgaaactggatcccttccttacaccttatacaaaaattaattcaaatggattaaagacttacatgttagacctaaaaccataaaaacctagaagaaaacctaggcaataccattcaggacataggcatgggcaaggacttcatgtctaaaacaccaaaagcaatggcaacaaaagctaaaattgacaagtgggatctaattaaactaaagagcttcttgcncagcaaaagaaaccaccatcagagaacaggcaaccctacagaaaggggagaaaaatttttgcaacctacctcatcttgacaaaaggggttaatttcccgaaaatntaccattggaaacttcaaaccaaaatttttaanaaaaaaaaaaaaaaaaaaaccccctttaaaaaaa

SEQ ID NO: 695 - DNA, 169 bp, Homo sapiens
atttgacaaagaaaaatgatacttctctttttttgctgttccaccaaatacaattcaaatgctttctgttttatttttttaccaattccaatttcaaaatgtctcaatggtgctataataaataaacttcaacactctttatgataaaaaaaaaaaaaaaaaaaagttt

SEQ ID NO: 696 - DNA, 239 bp, Homo sapiens
aaacactgacatcctgtgaagatgccagtctttacaggcgtttgtaaaagtagactgtggggagtatgttacactaatacaaagttttacaaatgaatacaagtgaaatatataaattacaatgaaatagaggaagattgtggctctgtcctgggttggttcttttagcagtcatattgctgttggtgagagcagcaaaagccacatatgcctccaagcactccatttattacttgaat

SEQ ID NO: 697 - DNA, 205 bp, Homo sapiens
acctgctccagcatcactatcctgagccctaaagagtgtgaggtcttctaccctggcgtggtcaccaacaacatgatatgtgctggactggaccggggccaggacccttgccagagtgactctggaggccccctggcctgtgacgagaccctccaaggcatcctctcgtggggtgtttacccctgtggctctgcccagcatccag

SEQ ID NO: 698 - DNA, 595 bp, Homo sapiens
  misc_feature (1)...(595): n = A,T,C or G
ggcaggtgaagctgatggggtcaaatgaaggtgaattcaaggctgaaggaaatagcaaattcacctacacagttctggaggatggttgcacgaaacacactggggaatggagcaaaacagtctttgaatatcgaacacgcaaggctgtgagactacctattgtagatattgcaccctatgacattggtggtcctgatcaagaatttggtgtggacgttggccctgtttgctttttataaaccaaactctatctgaaatcccaacaaaaaaaatttaactccatatgtgttcctcttgttctaatcttgtcaaccagtgcaagtgaccgacaaaattccagttatttatttccaaaatgtttggaaacagtataatttgacaaanaaaaatgatacttctcttttttttgctgttccacccaatacaattcaaatgctttttggtttattttttaccaatttcaatttcaaaagtntnaatggnggtttaataaataacttcacactntttttgatacnaaaaaaaaaaaaaaaaaaaaatttttaaaactncgccnccccctgggggaatccccccgggggngttanngggacca

SEQ ID NO: 699 - DNA, 275 bp, Homo sapiens
ctgacccccaggataagcactggctggctgagcagcatcacatgcgggcaacagggggcaagatggcctacctcctcatcgaggaggacatccgggaccttgcggccagtgatgattacagaggatgcctggatctgaagctagaggaattgaaatcctttgtcctaccctcctggatggtggagaagatgagaaagtatatggagacactacggacagagaatgagcatcgtgctgttgaagcacctccacagacctgaggccgggtcccctgg

SEQ ID NO: 700 - DNA, 381 bp, Homo sapiens
  misc_feature (1)...(381): n = A,T,C or G
cagatgccgaggtggatggtgtggatgaagaggaggaggacgaagaaggagaagatgaggaagacnaggacgatgaggatggtgaagaagaggagtttgatgaagaagatgatgaagatgaagatgtagaaggggatgaggacgacgatgaagtcagtgaggaggaagaagaatttggacttgatgaagaagatgaagatnaggatgaggatnaagaagaggaanaaggtgggaaaggtgaaaagaggaanaaanaaaccnnatnattgaagggagaaanatgatttaanaacccccagattnacccttgcanaaaaccaanaaacttgtttcaaattnttttgggtttgggaccttgccttcaattgggganttttttgg

SEQ ID NO: 701 - DNA, 204 bp, Homo sapiens
  misc_feature (1)...(204): n = A,T,C or G
gtgctatgtatggtgtgtgtgttgtgtatgtggtgtgtggtgtgtgtggtgcanggggcatgtgtgtggtgtatgctcntgtgtgtgctgngctcgtgtgtgtgctgtgttcatgcntgtgctgngtgttgtgtgtgngtactgcggggatcataaaatatgantgctttttangatgggaattganatgtaanatttgggggt

SEQ ID NO: 702 - DNA, 422 bp, Homo sapiens
  misc_feature (1)...(422): n = A,T,C or G
aaattaaagatgtctagttgctttttataagaccaagaaggagaaaatccgacaacctggaaagatttttgttttcactgcttgtatgatgtttcccattcatacacctataaatctctaacaagaggccctttgaactgccttgtgttctgtgagaaacaaatatttacttagaagtggaaagggactgattgagaatgttccattccaatgaaatgcattacaacttacaatgctgcttattggtgggagtactatnaagantcaaatttttctaacatatggaaangccttttgtcttccaaaaataatacctagggataatgggttaacttnggccggaacacccnttaagggcnaattccanacccttgncggccgtncttannggatcccnacttnggaccaactttgggngaaat

SEQ ID NO: 703 - DNA, 257 bp, Homo sapiens
ccatccttcagaagatcgacttccgctattggggagagtctgaggagtccgttctcccacggggcctcgtcactctttgcgaagggcgcctggcaggtcaaatgacctccatttccacctcgccttccaccttcttcttttgcttctccatcactgcctccagctctgacactttctctttgtcctccagcagcgagcgctgcacggtgacctggctgtacacacgtgccccctcctcggggctcaccgcccgcagc

SEQ ID NO: 704 - DNA, 226 bp, Homo sapiens
aaaatatgtttattttgtatgttttacaatgaatacttcagcaaagaaaataattataatttcaaaatgcaatccctggatttgataaatatcctttataatcgattacactaatcaatatctagaaatatacatagacaaagttagctaatgaataaaataagtaaaatgactacataaactcaatttcagggatgagggatcatgcatgatcagttaagtcact

SEQ ID NO: 705 - DNA, 465 bp, Homo sapiens
  misc_feature (1)...(465): n = A,T,C or G
aaatcaagcacatccttgctaatttcaaaaactaccagttctttattggtgaaaacatgaatccagatggcatggttgctctattggactaccgtgaggatggtgtgaccccatatatgattttctttaaggatggtttagaaatggaaaaatgttaacaaatgtggcaattattttggatctatcacctgtcatcataactggcttctgcttgtcatccacacaacaccaggacttaagacaaatgggactgatgtcatcttgagctcttcatttattttgactgtgatttatttggagtggaggcattgtttttaagaaaaacatgtcatgtanggttgctaaaaataaaatgcatttaccttgcccggcggccgctcgaagggcgaattccancacactggcnggcggtctagtggatnccaactcggaccnaacttggcgtaatattggcataanttttcc

SEQ ID NO: 706 - DNA, 221 bp, Homo sapiens
ggcaggtcgcgcggccgtggaaggtcagcgccgtaatggcgttcttggcgtcgggaccctacctgacccatcagcaaaaggtgttgcggctttataagcgggcgctacgccacctcgagtcgtggtgcgtccagagagacaaataccgatactttgcttgtttgatgagagcccggtttgaagaacataagaatgaaaaggatatggcgaaggccacccag

SEQ ID NO: 707 - DNA, 144 bp, Homo sapiens
caacattcttcaagtatctgaaatactattaattagcacctttgtattatgaacaaaacaaaacaaggacctcagttcatctctgtctaggtcagcacctaacaatgtggatcacactcatgggaaagtgttttgaggtagttt

SEQ ID NO: 708 - DNA, 608 bp, Homo sapiens
  misc_feature (1)...(608): n = A,T,C or G
ctgtctgaacgtgcatgccatgcacgcctgtgcatttcttcccacgccagaaacaccaacgttagcagtgagaaacagcctcttgtagaggaatcgtcgttttgttatagatgttatagccacgtgtattctctctgatggacagctatagcagatcagcttatacttgtcctataattcattatatatcaaatggtgagcaaatcactagacagaacattccctgaaatagattttagtacagaggcctgaattcatgtccacaatgacctgtgcttaactattccaaaggtcgctaaagatactgttactactattgagatattattgggctacttcacgtttacatagtaaatgtttgcagcatataacattacagactcataaacccataattaacttataagtgttaatggacaactgngctttgatttttgcctttagtgataaaaaacaaagtaatgaaatgggtactcctcaaagcatggacaatttactttgctantagggaaaacaaaacaaaatnncaattcntgtggaaccgaacctcnaaatacacaaaattgnttaaaggccaaaggtgaccggactaacacatgaaccttnnt

SEQ ID NO: 709 - DNA, 378 bp, Homo sapiens
cggcgccgcgcccatagccggacggggatctgagctggcaggatgaatgtgggggtggcacacagcgaagtaaaccccaacacccgagtgatgaatagccgaggcatctggctggcctacatcatcttggtaggattgctgcatatggttctactcagcatccccttcttcagcattcctgttgtctggaccctgaccaacgtcatccataacctggctacgtatgtcttccttcatacggtgaaagggacaccctttgagactcctgaccaaggaaaggctcggctactgacacactgggagcaaatggactatgggctccagtttacctcttcccgcaagttcctcagcatctctcctattgtgctctatctcctg

SEQ ID NO: 710 - DNA, 275 bp, Homo sapiens
cacctgccgtgacctcaagatgtgccactctgactggaagagtggagagtactggattgaccccaaccaaggctgcaacctggatgccatcaaagtcttctgcaacatggagactggtgagacctgcgtgtaccccactcagcccagtgtggcccagaagaactggtacatcagcaagaaccccaaggacaagaggcatgtctggttcggcgagagcatgaccgatggattccagttcgagtatggcggccagggctccgaccctgccgatgtgg

SEQ ID NO: 711 - DNA, 173 bp, Homo sapiens
tgaaatcattgatgaccacagagctgggaaaattgttgtgaacctcacaggcaggctaaacaagtgtggggtgatcagccccagatttgacgtgcaactcaaagacctggaaaaatggcagaataatctgcttccatcccgccagtttggtttcattgtactgacaacctcag

SEQ ID NO: 712 - DNA, 195 bp, Homo sapiens
caggtaaaatatcacagtaacaagatcatgcttgttcctacagtattgcgggccagacacttaagtgaaagcagaagtgtttgggtgactttcctacttaaaattttggtcatatcatttcaaaacatttgcatcttggttggctgcatatgctttcctattgatcccaaaccaaatcttagaatcacttcattt

SEQ ID NO: 713 - DNA, 498 bp, Homo sapiens
  misc_feature (1)...(498): n = A,T,C or G
ctgctgaaacttgggcctctcctctggatctaaggcccagcaacaggccatcacagcaaataattcatcaggacagttgattggctgggctattcggtaaccatctttcaggtatgcggccatctcgaaggggtcaatgtccacgtagggagtctggcccagagtcatgagttcccacagcgtcactccaaaggcccacacatcactagcgctagagaactcgttattaaccagactttcaagagccatccaacgaactggcctgttttcattgtcccccagacagtgatagtccatggggaacaagtctctggagagggcattgtctgtgatcttaacttgaantgtgtcatcaatgacacagttcctggcaaccaggtctttgtggatgacttcccttctggacctcggccgcgaccacccttanggcgaattncacacactggcggccgtactaatggatccanctcggacccaacttggcgnaanatggnataa

SEQ ID NO: 714 - DNA, 248 bp, Homo sapiens
aaatccttgaggggtacagcatcactcggattctgtgtccaatggccttagcaggaagattgcttcggaatttggcacgaaccatgccactgtttccatgggcccgagttacttttccccagatgactctggttttgtttggtttgccgccaggagtgactgtgttgttctttgctttatatacataagcgcatctcttgcccaaatagaattctgtttcatctcgggcgtgaacaccttcaatttta

SEQ ID NO: 715 - DNA, 128 bp, Homo sapiens
gtacaaacgagtcctggccttgtctgtggagacggattacaccttcccacttgctgaaaaggtcaaggccttcttggctgatccatctgcctttgtggctgctgcccctgtggctgctgccaccacag

SEQ ID NO: 716 - DNA, 160 bp, Homo sapiens
ctgggccagggatctctgaatcctgggaaacttggaactctggaactcagcttgatcaaagagaaggttctttagctctcaggtggaagcaggtagactccattttctgagagagtagtgtcttcttcccagaagctggagaggtgagattggatctgct

SEQ ID NO: 717 - DNA, 115 bp, Homo sapiens
ctggtttagaaaagtttagtatgtgacgataaactagaaattacctttatattctagtattttcagcactccataaattctattacctaaatattgccacactattttgtgattt

SEQ ID NO: 718 - DNA, 302 bp, Homo sapiens
ggacgtacggtcctgctagtagaggaatatgtcgagtttctctagggcgccccagcaatgggccacttttgctagaatatggtatctcttagatgggaaaatgcagccacctggcaaacttgctgctatggcatctataagacttcagggattacataaacctgtgtaccatgcactgagtgactgtggggatcatgttgttataatgaacacaagacacattgcattttctggaaacaaatgggaacaaaaagtatactcttcgcatactggctacccaggtggatttagacaagtaacag

SEQ ID NO: 719 - DNA, 139 bp, Homo sapiens
ttttctttataattcacacatatatgcagagaagatatgttcttgttaacattgtatacaacatagccccaaatatagtaagatctatactagataatcctagatgaaatgttagagatgctatatgatacaactgtgg

SEQ ID NO: 720 - DNA, 328 bp, Homo sapiens
ccagacctgaggcccacagacctggtccccacaaccaggattcctacaatgtacacattcctaatccaggctcaactctcctttacccaaaagtaaatgcctcaggactcaatctgaatcactgtctgtctcagcttctttcacatccacgctgaatttgtactcctggtcacatcccatgtaagcgtcactcatgaagtacagagtgtagttgtgggcaccagtggctggggccacaaagtccaacttcaccttggccttctgctgcaaggtcagcctcttgatggagatgaggctattggacttggcatctccaatcaccacccac

SEQ ID NO: 721 - DNA, 201 bp, Homo sapiens
aaaatcacaacagttagcaagctgacttttgtaatgtgctcaatacaaatacttgtgaacttttaatatgttgagtgctttcattttgataactggatctccatttgatattttcatttgtataactcatttgcagtctgaaaattttttttagtgccagtccctgaacatatcattgaaagttaattttctttgcatttt

SEQ ID NO: 722 - DNA, 277 bp, Homo sapiens
cacaagcctcttctgaagatggaaggccttttgcccgttgaggtagaggggaaggaaatctcctcttttgtacccaatacttatgttgtattgttggtgcgaaagtaaaaacactacctcttttgagactttgcccagggtcctgtgcctggatgggggtgcaggcagccttgaccacggctgttcccctcacccaaaagaattatcatcccaacagccaagacccaacaggtgctgaactgtgcatcaaccaggaagagttctatccccaagctgg

SEQ ID NO: 723 - DNA, 343 bp, Homo sapiens
ctgattttatttccttctcaaaaaaagttatttacagaaggtatatatcaacaatctgacaggcagtgaacttgacatgattagctggcatgattttttcttttttttcccccaaacattgtttttgtggccttgaattttaagacaaatattctacacggcatattgcacaggatggatggcaaaaaaaagtttaaaaacaaaaacccttaacggaactgccttaaaaaggcagacgtcctagtgcctgtcatgttatattaaacatacatacacacaatctttttgcttattataatacagacttaaatgtacaaagatgttttcccttttttcaattttt

SEQ ID NO: 724 - DNA, 186 bp, Homo sapiens
aagagatctgaaaccagccatagtgaaagtctatgattactacgagacggatgagtttgcaattgctgagtacaatgctccttgcagcaaagatcttggaaatgcttgaagaccacaaggctgaaaagtgctttgctggagtcctgttctcagagctccacagaagacacgtgtttttgtatcttt

SEQ ID NO: 725 - DNA, 343 bp, Homo sapiens
  misc_feature (1)...(343): n = A,T,C or G
aaataaatacttagaacacgacttggctcctacaagcatctggactctaggtctcagtactggagtgtctcacccatgggccccacgcagggacgccacggttccctcccaccccgtgatcaagacacggaatcggctgccgatggttggatcgcaatgcgccccttttctagagccttccccggccatctacaggcaggatgcggctgggaaaaagacaactggaatttctcgaaggttgatggtccgcacggttgaggattctacgtggttctcttggttcccctggtgtgtgtgtgtgtggaggaggccgcggcccttanatcaccttcttgagctcgtc

SEQ ID NO: 726 - DNA, 365 bp, Homo sapiens
ccagggactccagaatgatgccccatggcccctcggcgtcacagagaagaaaatagtctccagtggactcgatgcagtccttgtacatggtgacttatgggtgtggacctcaccagaatggttttctgatgccctgcagaaaaaggatgagacaaattgacaactctgcatctcttaggttggtgcaaaagtaattgtgctttttgctattaaaagtaatggcaagaaggctgggtgcggtggctcactcctgttatcccagcactttggaaggctgaggcgggccgatcacttgaggtcagcagttcaagaccagcttggacctgcccgggcggccgctcgagccctatagtgagtcgtattag

SEQ ID NO: 727 - DNA, 214 bp, Homo sapiens
  misc_feature (1)...(214): n = A,T,C or G
ctgagctccacacagccacatgaggatggggancagccnttccttgggttttgaaataacgaataaagtngancagtgaatttcaatcaanctggtncatcaggaccgtcttgccaaaacaccagttggcttttggttgctggaagctgtagcttttcaaaacgttcacacatttcaatgtatcgtcaatgtttttacctcggccggaccacgc

SEQ ID NO: 728 - DNA, 191 bp, Homo sapiens
  misc_feature (1)...(191): n = A,T,C or G
gaagtggggtggaagaagtggggtgggacgacagtgaaatctagagtaaaaccaagctggcccaaggtgtcctgcaggctgtaatgcagtttaatcagagtgccattttttttttttgttcaaatnattttaattnttgnaatgcncantttttttaatntgcaaataaaaagtttacctcggccgcaacc

SEQ ID NO: 729 - DNA, 575 bp, Homo sapiens
  misc_feature (1)...(575): n = A,T,C or G
nttagaaaataaaacttttaatacttaagagataacatgatgcaaacgttgcttgttggcctgactttccaggactaagaccctctgggaatcaatggggctcggtgacatggcgtaacctgctactggggtgtggtctcagacacaaaatcacactggatgttggtctacaaaggcaggattctctcattgctggataactcttgaaatgaagcctttgcctttgttacacatttggctttacaatcttcattgacaaatagttcggcaaagagtagaggagcacggccacgaagagcagcaggataagcaggaacagcaagccgatgatgacccacttaaagcggcgccacacgatgaacttcatggtcttgcatgggttggtgaaccagaagaaggaggtttctggtcnatttggtaaagtccacttggggttatgttgggtcgtccgcccttccgntggcttcgtcggctctttcgtgaggattccatgtatntcctttccacattccngcnctnttttnctacatgacttgccaccctagnaatcacctgngcgtctangtcactgacat

SEQ ID NO: 730 - DNA, 144 bp, Homo sapiens
ggattttaatatgatattttattatgggtgtctgtaaggaaaaaaaagatcaacaaccacatacaagcttacaaagttaaatttcaacacattctctatgctagtgtgacaaaagcagccccataatttggtttttattgttga

SEQ ID NO: 731 - DNA, 390 bp, Homo sapiens
aaaatactgaacaaaaagactaaaaagggccaaccaaacttgaatgtacaaatggagtaccttcttcaaaaaatacaagaaaaatgttaaacattttgttcctacaggttaaaatatctgctgcctattaggttcttctgtgacatgtgcctcccagcagtgaactaaatttgtcgacataaactggattgctaaactatgctaaatataagatgttcacatatttttattatggtaaaaaattttctaaatatgttctacatgtttcttatttatttgcctctgaaggaaggttggcctgaagaactgaaagaacctcttattttgcaagacaggcccaagcatgtaatacttttgtaccatatgagatttatatgaaataaatttttt

SEQ ID NO: 732 - DNA, 695 bp, Homo sapiens
  misc_feature (1)...(695): n = A,T,C or G
cggccgaggtaaaacaatttacctcagaattccaagttgaagntcccaaagtatattaaaaacttctcaaatcattaatttgaatcagatgttccaaatcaaagggaattaaatactcttttttcttgggccaattggataaatcttgaaacctattttgaaatagtattaaagtgacaagaaaaagccaaaaatatatcttttgccttggcctttggatatttttaaccatggtaccattttttggcccaaggcttgggaaatattccaanttaggaaaataaaaagcccttctttcatcattaaaagctttanggatantnaaattatttcttggaagggaaatggaaatttccccttaaattaccttttttaagtttaaatttccccggtggaaaaataaagccaaaaacaggcccctttgggaatanttggnaaaaacctggtttcttnaaaggtaatnggggaaaatnaattctttcttnaagaaatttgcccaaaccctttancccgaaggtttaacctggagttnttttgaaggncctgaagtatttttgcttgggncctggccaatcatttntttancctggccccgggngggncgctttgaaaaggggggaaatttccacaccccttngngggccggttncttanggggatnccaanctcgggnnccaaactttgggggnaaanat

SEQ ID NO: 733 - DNA, 384 bp, Homo sapiens
  misc_feature (1)...(384): n = A,T,C or G
ttttttttgcttttatggtttttatttttcaatttttattttggttttcttacaaaggttgacattttccataacaggtgtaagagtgttgaaaaaaaattcaaatttttgggggagcgggggaaggagttaatgaaactgtattgcacaatgctctgatcaatccttctttttctcttttgcccacaatttaagcaagtagatgtgcagaanaaatggaaggattcagctttcagttaaaaaagaagaagaagaaatggcaaagagaaagttttttcaaatttctttcttttttaatttaaattgagttcatttatttgaaacagactgggccaatgtccacaaanaattcctggtcaacaccaccgatcctgccccggcggg

SEQ ID NO: 734 - DNA, 458 bp, Homo sapiens
  misc_feature (1)...(458): n = A,T,C or G
ctgagcctgagtgcgaagacggagagaaggccgaccacagtcatgacatcaacccccataacctggggacaactcaagaaaaccacacaggaggctgagaaactactggagcaccagggacagtctgtaaagttggatggaccaccaatgggaaaatgagagctgcccaccctggccttacactccttcaattaatacataaacagaaaggaggatatacagagagccaaaggcccatgggacgtgaccaacattccactgagtctatacnatcaaacagcaaactgtttatcatgaatacagaatgtgggcaaactcatgacttgtgcctgccccaaaaggtttgctgaagggcaattgcttnctgacgcccagctccttganggtatctattgggacatccananaatgcagtcttgcaagcctactctggaccgaacaaaactcggccgcgaaca

SEQ ID NO: 735 - DNA, 453 bp, Homo sapiens
  misc_feature (1)...(453): n = A,T,C or G
aaaaaagtgacattgctttattactattggcaggtggggcctgcatgaggtggttagtgtgctcaggggatgggtgggctgtggagatgatgacagaaaggctggaaggaaagggggtgggtttgaaggccagggccaaggggtcctcaggtccgcttctgggaagggacagccttgaggaaggagtcatggcaagccatagctaggccaccaatcagattaanaaattctgagaaatctagctgaccatcactgttggtgtccagtttcttcatcatgccggtcaaggacaccangggtccttcttggttctttgtgaaggcancttagttcttgtattcatgaaacttaaggaactctttctttggaaaagaagtgtaagttataacccatncttttccanccatacctttttggaaaaacaacaaatcaaggggacttcnaatgcacccg

SEQ ID NO: 736 - DNA, 317 bp, Homo sapiens
ccagagcgagtctaccctggtaatctccaccttagacaaataattataatctagcattgcaaaaaagaaataacacatatctaccagagatatacacaacaatttcataccagcattgttagtaattagaagaattataagcaatctatgttgcaacagtaggaaaatggataaatgagctgtagtacatgtataaaagagtcaaaacagagaaaatgaatgaactagaactacatctttaacatatatgaatacttttcaaaagaaaacaatctgcttgagattatatacaatattttcctatttatacaaggttt

SEQ ID NO: 737 - DNA, 220 bp, Homo sapiens
ccagggcccccctgctccaggctgggcgtcagaaacccttccccagcccctcggacttccccagggtggaggtcccctcaaacacagcccctcagcttctaggctgctttggaggccagacaggaagagttccattcattcaccctgatcccagcagtagtagcgggatgagaaactcacccccaggccgggggtgcttggagagcgcttgagaggattt

SEQ ID NO: 738 - DNA, 262 bp, Homo sapiens
aaaaacagactgtaacttgatcttctgaaatccttctcgaaccacaactcgttctgttaaagaaatcctaggaaagaagtcctactgatattgtcgatagtctccaaaaggtgaggaaggtaactgagttgaaggcaactgggaggggtcttctgcaaactgaggaccattgggaaactgtgcagaggcaaatcttgtcaacaagataccagctccttcaattaaagctaggagaatgccacccattgcggctgacccaacc

SEQ ID NO: 739 - DNA, 567 bp, Homo sapiens
  misc_feature (1)...(567): n = A,T,C or G
agaaggccctgaagctgatggggtcaaatgaaggtgaattcaaggctgaaggaaatagcaaattcacctacacagttctggaggatggttgcacgaaacacactggggaatggagcaaaacagtctttgaatatcgaacacgcaaggctgtgagactacctattgtagatattgcaccctatgacattggtggtcctgatcaagaatttggtgtggacgttggccctgtttgctttttataaaccaaactctatctgaaatcccaacaaaaaaaatttaactccatatgtgttcctcttgttctaatcttgtcaaccagtgcaagtgaccgacaaaattcagttatttatttcaaaatgtttggaaacagtataatttgacaaagaaaaatgatcttctctttttttgctggtcccccaaatacaattcaaatgctttttgtttattttttaccaatttcaattcaaaatgtctcaatggggctttaataaataacttcaacctctttatgacaaaaaaaaaaaaaaaaaaaattnnctnccgggggccttaggggaaaatccncac

SEQ ID NO: 740 - DNA, 357 bp, Homo sapiens
aaataattatctatgtgcctgtatttcccttttgagtgctgcacaacatgttaacatattagtgtaaaagcagatgaagcaaccacgtgttctaaagtctagggattgtgctataatccctatttagttcaaaattaaccagaattcttccatgtgaaatggaccaaactcatattattgttatgtaaatacagagttttaatgcagtatgacatcccacaggggaaaagaatgtctgtggtgggtgactgttatcaaatattttatagaatacaatgaacggtgaacagactggtaacttgtttgagttcccatgacagatttgagacttgtcaatagcaaatcatttttgtattt

SEQ ID NO: 741 - DNA, 206 bp, Homo sapiens
ccaccctttcagactcctttctgaatgcttgtggcatctgccccatgattaggaatggacaccctgaccacgtcatagatgcccatttcacactggcatgtggatagtgactataaaacgtcccttcagaacaaaccaagacctgaaggggaagcaggaagggacacccacacactgagtctctgctctcatcctagcttatctgg

SEQ ID NO: 742 - DNA, 407 bp, Homo sapiens
  misc_feature (1)...(407): n = A,T,C or G
aaatagcctaaatgatggtgcttggtgagtcttggttctaaaggtaccaaacaaggaagccaaagttttcaaactgctgcatactttgacaaggaaaatctatatttgtcttccgatcaacatttatgacctaagtcaggtaatatacctggtttacttctttagcatttttatgcagacagtctgttatgcactgtggtttcagatgtgcaataatttgtacaatggtttattcccaagtatgccttaagcanaacaaatgtgtttttctatatagttccttgccttaataaatatgtaatataaatttaagcaaacgtctattttgtatatttgtaaactacaaagtaaaatgaacattttgtggagtttgtattttgcatactcaaggngagaattaaagtttt

SEQ ID NO: 743 - DNA, 62 bp, Homo sapiens
aaaaatgtctaaatttgcttttgccatggcgctaatgctaatggtaaattattgattgcgtg

SEQ ID NO: 744 - DNA, 557 bp, Homo sapiens
  misc_feature (1)...(557): n = A,T,C or G
cctacagacttatttcttcttggacacacccacggtgcggccacggcggccagtggtcttggtgtgctggcctcggacacgaaggccccagaagtgacgcagccctctatgggcccgaatcttcttcagtcgctccaggtcttcacggagcttgttgtccagaccattggctaggacctggctgtattttccatcctttacatccttctgtctgttcaagaaccagtctgggatcttgtactggcgtggattctgcataatggtgatcacacgttccacctcatcctcagtgagttctcccgccctcttggtgaggtcaatgtctgctttctcaacaccacatgagcatatcttcggcccacacccttaatggcagtgatggcaaaagctattttccgcccccatcgatttggtgttgagtactccaaaatatgctggaacttttcaggatactagagaatggctgcacacaagcgnggntgangctcacctcgccggacacctaaggcnaatcacaatgnggcntctanggaccactcgnccactgggnatatgga

SEQ ID NO: 745 - DNA, 297 bp, Homo sapiens
aaaacattgtcaggtgaggcaaatgcacaagtaatagaaagcaaagggcaaggttcactgaatcacagcagtcagaagaaagtgctttagggaaccaagagattgtttccagcctgaagaggcatgggtggcaaatcagaaaaggggattgagattaaaatagaagacttcagtctggattgttgatgacactcagtatggactatatttgtctctccttttcctttctccccatctttgggcttaatttacatgtagtgcccaggactgttcaatgcgcctgcaattaaaccaagg

SEQ ID NO: 746 - DNA, 514 bp, Homo sapiens
  misc_feature (1)...(514): n = A,T,C or G
aaagaactctgggctgtactgaatggctggagacaacactttatcagttttgacactgacaggagtggaacagtagacccacaagaattgcagaaggccctgacaacaatgggatttaggttgagtccccaggctgtgaattcaattgcaaaacgatacagcaccaatggaaagatcaccttcgacgactacatcgcctgctgcgtcaaactgagggctcttacagacagctttcgaagacgggatactgctcagcaaggtgttgtgaatttcccatatgatgatttcattcaatgtgtcatgagtgtttaaatcaagaagaagctgcatgaatgtaatcaacattcaactggagctctnctttgcttgtcctctttgccttcggtaatatgtataaacttacatcacgactttctnttaacagaactcggccgcganccccttanggcgaattcaacaccttgcggccntntagtggatccactcggaccaacttggcgnaanatgggataat

SEQ ID NO: 747 - DNA, 249 bp, Homo sapiens
atcaatgcttacaattgtgaagagcccacagaaaagttaccttttcccatcatcgatgataggaatcgggagcttgccatcctgttgggcatgctggatccagcagagaaggatgaaaagggcatgcctgtgacagctcgtgtggtgtttgtttttggtcctgataagaagctgaagctgtctatcctctacccagctaccactggcaggaactttgatgagattctcagggtagtcatctctctccag

SEQ ID NO: 748 - DNA, 367 bp, Homo sapiens
  misc_feature (1)...(367): n = A,T,C or G
ctgagaaacagattaaacatttagagattgaaaagaatgctgaaagtagcaaggctagtagcattaccagagagctccaggggagagagctaaagcttactaaccttcaggaaaatttgagtgaagtcagtcaagtgaaagagactttggaaaaagaacttcagattttgaaagaaaagtttgctgaagcttcagaggaggcagtctctgttcagagaagtatgcaagaaactgtaaataagttacaccaaaaggaggaacagtttaacatgctgtcttctgacttggagaagctgagagaaaacttagcagatatggaggcaaaatttagagagaaagatgagagagaagagcagacctcccnggc

SEQ ID NO: 749 - DNA, 384 bp, Homo sapiens
  misc_feature (1)...(384): n = A,T,C or G
aaatttagtattacatatgatctggctaagagcaagaggccttcttatgagtgatctccatcaccctgtacagtgcctggcacagaatctagagtttagccaactctcaacaaatgttttagtgaatgaatgaatgattgactaaagaaaaacatgagttacttagtgaccaaatctaatactcagtggaatagctgattataatcgctaaaatattcataatagaaataaagagatctgtatgcagtctactccatatagtcaaaagatctcatggtagccttttctaaatgaaatttttcttaagtagtgtaagaataaatttaaactaattataattatcaagtgacttcttagggagatgttttangaaaaattattaat

SEQ ID NO: 750 - DNA, 502 bp, Homo sapiens
  misc_feature (1)...(502): n = A,T,C or G
ctgtaaaagatcctatgcgaaagacactggctcttttttttaatcccccaaataaattttgcccccttttaggccatgttccattatctcttaaaattggaacctaattcgagaggaagtaagaagggtctgttctgtggctgagctaggtgaaccccggggtaggggaaagatgttaacacctttgacgtctttggagttgacatggaacagcaggtagttgttatgtagagctagttctcaaagctgccctgcctgttttaggaggcgttccacaaacagattgaggctcttttanaattgaatttactcttcagtattttctaatgttcanctttctaagaagcatatatttttcaaagaagtgaggatgcantttctcacgttgcaacctattctgaaatgggttacctgccccggcggccctcgaaagggcgaattncacacactggcggccgtactaatggatccactcggaccaacttggntaacatggcatact

SEQ ID NO: 751 - DNA, 345 bp, Homo sapiens
taaaaattgaaaaaagtggaaaacatctttgtacatttaagtctgtattataataagcaaaaagattgtgtgtatgtatgtttaatataacatgacaggcactaggacgtctgcctttttaaggcagttccgttaagggtttttgtttttaaacttttttttgccatccatcctgtgcaatatgccgtgtagaatatttgtcttaaaattcaaggccacaaaaacaatgtttgggggaaaaaaaagaaagaatcatgccagctaatcatgtcaagttcactgcctgtcagattgttgatatataccttctgtaaataactttttttgagaaggaaataaaatcag

SEQ ID NO: 752 - DNA, 675 bp, Homo sapiens
  misc_feature (1)...(675): n = A,T,C or G
ctgtntgtactanacaaggttaccaagtgcggaattggttaatactaacagagagatttgctccattctctttggaataacaggacatgctgtatagatacaggcagtaggtttgttctgtacccatgtgtacagcctacccatgcagggactgggattcgaggacttccaggcgcatagggtaggaccaaatgatagggtaggagcatgtgttctttagggccttgtaaggctgtttccttttgcatctggaactgactatataattgtcttcaatgaagactaattcaattttgcatatagaggagccaaagagagatttcagctctgtatttgnggtatcaggnttggaaaaaaaaatctgatactccattngattattgnaaatatttgatcttgaatcacttgacagtgtttgtttgaattgtgtttgttttttcctttgatggacttaaaagaaattattcaaagggaaaaaaaacaantatgccccttntttnanccgaaccnaaccanaaaaagaaaattgngcttttttntaatccaaagggtntttttgnagnatgcttgacttttcccatttttnangacatctttccgaccttttttncctaaaaccttntattggnnaaancttaancttttcangattttcccangaatttttcctttttg

SEQ ID NO: 753 - DNA, 448 bp, Homo sapiens
  misc_feature (1)...(448): n = A,T,C or G
gaaaattccatggacaccccctggaactgctctgcagttttactccaacctacacaatgctgaaacctcttcttgggtgaatttggtattgtggtgtgtggtcttggtgctccaggtcgtgcagtggaagtctgaagccaccccataccggcctctggagaggggtgaccctgagtggagctctgagacagatgctctcgttgggtcacgcctttcccattcctgaagaataagcggagtgcttcctgcagccgaagactccatgcccaagtgcctgtaatcccccccctcaaggccctgtttatgttgggagtcttagttttcctttcgttggggggtgggggggaaacataatgacaggcccccctccacctcttcctgnagacctgcccgggcggncgntcnaaagggcnaaattccacacactggnggnccgtctannggatcc

SEQ ID NO: 754 - DNA, 603 bp, Homo sapiens
  misc_feature (1)...(603): n = A,T,C or G
ggcaggtctaaagtgtgagtaggaacattctcttattatgggtggaggaaagagagaggagattgagaaaataagataaaatacattgatgcgcatcatttttggtgttcgaaaagtaggattgaattaggactaataaatctagagaattttacctctttcaatgcccaagccacacttttctatcactttgaaaccgaaaaagtaaatactttcccaacatttgctttgctggtaggaaatgctttaataaaaatgcaatctctaagttgccatggcatcattaaaagaaaggatgtcatgcccaggtccagaacttgaaggtggcaggcaccancaagcaccatagctctgaatgggcctgccttacaggtcctcactccaacactgctcacttcttccagcttgaaaatggagaacatgttcacaccctgggttgtaagtaggaggaactctgatcagcaagaagcttgcanaggacaatatgangcaatagtattttactggacctcggccgcgaacaccttanggcgaaatcnaccccttggcggccgtntatggatccactcgnccaacttgcgaanatgggcaaanttttccggg

SEQ ID NO: 755 - DNA, 254 bp, Homo sapiens
aaaaaactggtttgtcaaatcacatacatgagcagatacacaactaccaaagtggcctgtaatagacaccagtggggcggtcaccacacagtacctgaaaaatacagctaaaaaaggaggagtctgttgagtatttaatttcagatctacttgactccttgttgaacggctttaagttagcatatagtgagtgagaggtagagtcccaagtataatagctgatgcctcagggctccatttacctgcccggcggc

SEQ ID NO: 756 - DNA, 344 bp, Homo sapiens
ctgattctatttccttctcaaaaaaagttatttacagagggtatatatcaacaatctgacaggcagtgaacttgacatgattagctggcatgattttttcttttttttcccccaaacattgtttttgtggccttgaattttaagacaaatattctacacggcatattgcacaggatggatggcaaaaaaaagtttaaaaacaaaaacccttaacggaactgccttaaaaaggcagacgtcctagtgcctgtcatgttatattaaacatacatacacacaatctttttgcttattataatacagacttaaatgtacaaagatgttttccacttttttcaattttt

SEQ ID NO: 757 - DNA, 191 bp, Homo sapiens
  misc_feature (1)...(191): n = A,T,C or G
gtaanacctcctgcccttagctctcttgctcaccacccaagaacctcaggacagaagcgagagcccattgctcctgctcagctcagcccggctgcggaggaacccttggcaggcagaacctggaggtgtcagaggctcaactcctccatctaaccagcaggctcccagagtccccggaagagcctgcgcag

SEQ ID NO: 758 - DNA, 212 bp, Homo sapiens
ctgcctttcctgagtaccctccgacggttggaagaccaggccactgcatatgtgtgtgagaatcaagcctgctcagtgcccatcactgatccctgcgaattacgaaaactactacatccatgactgccccaacccccttggggtggggcagaaggtgaagcatcccaactgactagagactcaggccctgcagggccctatagaacctgtgg

SEQ ID NO: 759 - DNA, 450 bp, Homo sapiens
  misc_feature (1)...(450): n = A,T,C or G
aaaaaagtgacattgntttattactattggcaggnggggcctgcatnaggnggttagtgtgctcaggggatgggtgggctgtggaaatnatnacaaaaaggntggaaggaaagggggtgggtttnaaggccagggccaaggggtcctcaggtccgnttntggnaagggacagccttgaggaaggagtcntggcaagccatanntaggccaccaatcaaattaanaaattctgagaaatntanctnaccatcactgttggtgtccagtttcttcatcatgcggcaaggacaccagggtccttctggttctttgtgaaggcanctagttctgtttcatgaacttaggaactctgcttggananagtgtaacctcggccnaccccctaaggcgaatccacacacttgcggccntctatggatccaactcggnccaacttgcgaatatggcata

SEQ ID NO: 760 - DNA, 519 bp, Homo sapiens
  misc_feature (1)...(519): n = A,T,C or G
tttaactcctgaaatcgaactacgtttaagtttgtatgtttattacctgtttgagcacttaggtgcaattgtgggagcggggatgtcaagttcatttatgtgactctttggctcaacttacataatctttgttttgatatcacagttgtctaattattttactttgtagcttaaggcaggctgaattgttgataaaaatggaaaaaagtagtatattgttatataagcttctgaggtgtgttttgntgtataacctggaggttaaaaagcatcccttatgtatagtagtnaaggcataaactgtgactttaaatattcacanaaccagacttatttgatgngataataccatgattagcatttggttgcttttgtttatttatccggtcattttctcttccatgtcatnaacangnggnggcggtananataaacctgccggcggccctcnaaaggcgaattccacacactnggggcgtactanggatccanctngnccaacttggngaatatggcata

SEQ ID NO: 761 - DNA, 270 bp, Homo sapiens
gaggaatgctggactggaggcccctggagccagatggcaagagggtgacagcttcctttcctgtgtgtactctgtccagttcctttagaaaaaatggatgcccagaggactcccaaccctggcttggggtcaagaaacagccagcaagagttaggggccttagggcactgggctgttgttccattgaagccgactctggccctggcccttacttgcttctctagctctctaggcctctccagtttgcacctgtccccaccctccactcag

SEQ ID NO: 762 - DNA, 577 bp, Homo sapiens
  misc_feature (1)...(577): n = A,T,C or G
atgacgggcccggtgctgaagggcagggaacaacttgatggtgctactttgaactgcttttcttttctcctttttgcacaaagagtctcatgtctgatatttagacatgatgagctttgtgcaaaaggggagctggctacttctcgctctgcttcatcccactattattttggcacaacagggagctgttgaaggaggatgttcccatcttggtcagtcctatgcggatagagatgtctggaagccagaaccatgccaaatatgtgtctgtgactcaggatccgttctctgcgatgacataatatgtgacgatcaagaattagactgccccaacccagaaattccatttggaaaatgttgtgcagtttgcccacagccttcaactgcttctactcgcccttctaatggtcaaaggacctcgangccccaangggaaaatccaggnccttctggtattcctggganaaaagggggaccctggtatttccaggacaancangggncccctgggttttnctgggccccctggnaatttgngaataatgccctactgggccctcaaaactatttttcccca

SEQ ID NO: 763 - DNA, 261 bp, Homo sapiens
ctggagatggtggtgaacggtctgtttgcatttcttggaagaagatcttttattctgctgctcaacccaggtctctgccttccttagagactgaggcccatccttcagtttccctgattctggagaatggcccgcagcctcccactcagggcttggctgtgctcctctagtccatcccagggctggaagggacatccctggcggtacacgaaggtgtcccagcagtgcttaaattcactgtatgtcattattgaaattttg

SEQ ID NO: 764 - DNA, 257 bp, Homo sapiens
aaaaacaaaatcacttaaaggaccctttgactgatgcctctcagtttatatttttatgtgactttatatttcttttgatacacttgacattttaggaaattttgatgtgatttatcaaaacctttacttgatggttagagttcctgcatttatgaaatcaaatctgtaataacagaaatcctggaatactcttaatatatacttctattttgtgtttgttactgtgattaatatttgcagttgtatattttacattt

SEQ ID NO: 765 - DNA, 109 bp, Homo sapiens
ccagtgctgccagccgacctttctgtggtgatggaaatctttttctgtgctgtccaatacagcagccaccgaccacttttgcttattgagcacctcaatatagaggtgg

SEQ ID NO: 766 - DNA, 155 bp, Homo sapiens
  misc_feature (1)...(155): n = A,T,C or G
tgcanattatttgcccaaagttgtcctcttcttcagattcagcatttgttctttgccagtctcattttcatcttcttccatggttccacagaagctttgtttcttgggcaagcagaaaaattaaattgtacctattttgtatatgtgagatgttt

SEQ ID NO: 767 - DNA, 345 bp, Homo sapiens
  misc_feature (1)...(345): n = A,T,C or G
aaaaacatnnactatacattgaaatgtgtgaacnttttgaaaanctacagnttccagcagccaaaagcaactggtgttttggcaagacggtcctgatgtacaagcttgattgaaattcactgctcacttgatacgttattcagaaacccaaggaatggctgtccacatcctcatgtggctgtgtggagctcagacctgcccgggcggnccgntntaaagggcgaattccancacactggcggcncgatactagtggatccaactccncnccaactttncgtncccatgganatattttttggnnggaanttttttnccncnccggggggccnnttaaaaggggaa

SEQ ID NO: 768 - DNA, 213 bp, Homo sapiens
aaaacaactacttaacatttactcatagataaaaatatttacaattttacaccttcaggaaggctccaaaatataaacactgtacctctccctagagaaaaaaaaattattcttctcttcaaaaacaggaatacattcattttttctcactgtgtgaatcaagtaattatacaaataaacatctgaaacattttcctttttaatatatttata

SEQ ID NO: 769 - DNA, 525 bp, Homo sapiens
  misc_feature (1)...(525): n = A,T,C or G
aaaatgaaaaattggtgctactattaaattgcacagttgaatcatttaggcgcctaaattgattttgcctcccaacaccatttctttttaaataaagcaggatacctctatatgtcagccttgccttgttcagatgccaggagccggcagacctgtcacccgcaggtggggtgagtctcggagctgccagaggggctcaccgaaatcggggttccatcacaagctatgtttaaaaagaaaattggtgtttggcaaacggaacagaacctttgatgagagcgttcacagggacactgtctgggggtgtagtgcaagcccccggcctcttcctgggaacctctgaactcctccttcctctgggctctctgtaacatttcaccacacgtcagcatctaatcccaagacaaacattcccctgctcgaacaaacctgcccgggcgggccgctcaagggcgaattncacacacttngcggccgtnctaggggatcccaactcggnaccaagctttggnggnaaanatgggg

SEQ ID NO: 770 - DNA, 233 bp, Homo sapiens
aaaaatttacttattacttgttcttagcaaattaagacaattacaataaaacatcagctaactgggttcttgtgagaaaactgaggtcagcttggaaaggagttccccgagtggagttcccagcggcccgcggctgacggccagatctgtcctgaggggtcgtgggagcccagcgcctgccttgagggaaatgaacactgaaaacaggatttgggagcagtattggattgaca

SEQ ID NO: 771 - DNA, 271 bp, Homo sapiens
tggcagtgcaaatatccaagaagaggaagtttgtcgctgatggcatcttcaaagctgaactgaatgagtttcttactcgggagctggctgaagatggctactctggagttgaggtgcgagttacaccaaccaggacagaaatcattatcttagccaccagaacacagaatgttcttggtgagaagggccggcggattcgggaactgactgctgtagttcagaagaggtttggctttccagagggcagtgtagctttatgctgaaaaggtgg

SEQ ID NO: 772 - DNA, 533 bp, Homo sapiens
  misc_feature (1)...(533): n = A,T,C or G
ccatggaagcctcagggcacagggcaggctggtggatgttttggtcccaagcccctttctgatcacaggcaggtcaattaagcctctgggcctggctgtcctctcctggacgtggagtgtaagtcccacactacacaaggctgtgcagcttcacagagatagtgcttgtgatgcttatccctaacaagaggaccttgaacttggagaattataggaagactaggtctgtgcccttaaattgatcattctttccatcctgactaagcacgggtgagccagtttgtgcagaggtctgtgtgtagatgggaccatggaggaaaagagaagcttccctttgcatggtctccttanaacccattttgtaccggacccanaaggatgtatggacccaaagcacatccctcttggaaanggctggccccagtcttcctaatgcaacctgcccggcgggcgcttcaaanggcgaatttcacacacttgcggncgntactaatgggatcccanctcggtaccaaacttggcgnaaanatggg

SEQ ID NO: 773 - DNA, 341 bp, Homo sapiens
ttctgaagttgccatcagttttactaatcttctgtgaaatgcatagatatgcgcatgttcaactttttattgtggtcttataattaaatgtaaaattgaaaattcatttgctgtttcaaagtgtgatatctttcacaatagcctttttatagtcagtaattcagaataatcaagttcatatggataaatgcatttttatttcctatttctttagggagtgctacaaatgtttgtcacttaaatttcaagtttctgttttaatagttaactgactatagattgttttctatgccatgtatgtgccacttctgagagtagtaaatgactctttgctacatttt

SEQ ID NO: 774 - DNA, 193 bp, Homo sapiens
  misc_feature (1)...(193): n = A,T,C or G
aaaaatgttttgtagggaaaccctttaatgctttcatttttattcaaaatcagtccagctgctagtcagcgggcagcagctacaataccaagttctggcagttgcagtactagatattgtgcctgcaagtcataaaaaaaaaaaaaaaaanaaaaaaattgaaaaanngcntttcccnttaaaanaaaaaaat

SEQ ID NO: 775 - DNA, 210 bp, Homo sapiens
ctctagtgctgtgaaaaaaaaatgctgaacattgcatataacttatattgtaagaaatactgtacaatgactttattgcatctgggtagctgtaaggcatgaaggatgccaagaagtttaaggaatatgggagaaatagtgtggaaattaagaagaaactaggtctgatattcaaatggacaaactgccagttttgtttcctttcactgg

SEQ ID NO: 776 - DNA, 161 bp, Homo sapiens
ctgctcctgctgctgctgcagccccagctaaggttgaagccaaggaagagtcggaggagtcggacgaggatatgggatttggtctctttgactaatcaccaaaaagcaaccaacttagccagttttatttgcaaaacaaggaaataaaggcttacttcttt

SEQ ID NO: 777 - DNA, 459 bp, Homo sapiens
  misc_feature (1)...(459): n = A,T,C or G
tggagtctgaagtagctataaagcagctataaaacagaaatacatgcatagctgcagaaaccatgacaggtagaggacttttcttttggttttgttttgttttgttttgttttgtttttggttttacagagaagagatttttattacaaagaaaaaaattccagtgaattgtgcagaaatgctggtttttacaccatcctaaagaaaaactttacaagggtgttttggagtagaaaaaaggttataaagttggaatcttaaattgtaaaattaaccattgagtgtcaaagttctaaaagcagaactcattttgtgcaatgaacataaggaaagactactgtataggttttttttttttctcnttttcctcggccgnaaccaccctaagggcgaattccacacacttggcgcccntactagtggatccaactnggnccaacttggngnaatnatggcata

SEQ ID NO: 778 - DNA, 288 bp, Homo sapiens
cagagagccattttgtgaatggattggattatttaataacattaccttactgtggaggaaggattgtaaaaaaaaatgcctttgagacagtttcttagctttttaattgttgtttctttctagtggtctttgtaagagtgtagaagcattccttctttgataatgttaaatttgtaagtttcaggtgacatgtgaaaccttttttaagatttttctcaaagttttgaaaagctattagccaggatcatggtgtaataaaacataacgtttttcctttacctgcccggg

SEQ ID NO: 779 - DNA, 508 bp, Homo sapiens
  misc_feature (1)...(508): n = A,T,C or G
aaatatctaaaacaatggcccactgaagaaaggaacaattaactctttaattaattccttaggataaatacccagaaatttaacagctagggcagacttctaatacaataccgaaagtccttccaaaaaccaagtggttgccaacttatgtcccttagcattataacattcttgagccaatagtgtaaaaatacgctgacaattttataggcaaacattactcaaggtatcttactttccacttattactaaagtaattaacccctaaatagatgctcctcaacagtgggactacatcctggtaaacctatcataagttgaaactatcaagttgaaatgcatttagtaccctgataaacctatcataaagttgaaaatttgtaaattgaaccagtgtaaatcagangccatcttacacctcggccgcgaccacctnagggcgaattncagcaccttggcggccgtactagtggatccnactcgtaccnacttgggnaatcatggcata

SEQ ID NO: 780 - DNA, 569 bp, Homo sapiens
  misc_feature (1)...(569): n = A,T,C or G
aaagcactcacataaatccatttcacccaaaaaggaaacataaagtgcttctagcagtacaagcacggttggcatggcctttccaaaggtcttccactagagtctagagaaatctaaatatagtcatccacaaactggatgtttttattttctgagccattagagattttcaaaatcactttgatttttaaaaactcatcaaatgtgaatcatggcggggaagaccactgagctgatttctgataactaagttatcactgaacataatttatcatatatggctactggcatcatgaagaccttgggatagggaagactcttcatgagaaatataaacatcacttgtgtaggaatcaccaggtgtcctanagcagtttgactaaagacttctagtgtttactcctcccacgnactcaacccaagaccagagacaatggcaactcctgaggttacacagaaccagtgagtatgnnagctcacttagccattaatctaaatgtataactggtgctntntgcttanctatatctaaggttntntctgtnttntnaactncgngcgcagnatcc

SEQ ID NO: 781 - DNA, 391 bp, Homo sapiens
gggctgaagaaatcactattgtgtatatactcaagtctttttatttttcctcttttcataaatgctcttggacattattgggcttgcagagttcccttattctggggattacaatgcttttatcgtttcaggcttcattttagcttcaaaacaagctgggcacactgttaaatcatgattttgcagaacctttggttttggacagtttcatttttttggatttgggatagattacataggagtatggagtatgctgtaaataaaaatacaagctagtgctttgtcttagtagttttaagaaattaaagcaaacaaatttaagttttcttgtattgaaaataacctatgattgtatgttttgcattcctagaagtaggttaactgtgttttt

SEQ ID NO: 782 - DNA, 195 bp, Homo sapiens
  misc_feature (1)...(195): n = A,T,C or G
gggaattgnctnaatcttntacggcgcctgtatgnnttgngaattcncctttcgtggcgcggccaggctaaccactcaatccatttgtgcttttgttttttttatggtgcttaaagtaaaaaacccatccttttgcaaggcattcnttgttggtaccttaggcattttaattttgnctnaaaantntgnaaaaaa

SEQ ID NO: 783 - DNA, 336 bp, Homo sapiens
  misc_feature (1)...(336): n = A,T,C or G
ccacagggtccactgaaacggggaggggatggcagcttgtaatgtgggcttttgccacaacccccttctgacagggaaggccttagattgaggccccacctcccatggtgatggggagctcagaatggggtccagggagaatttggttagggggaggtgctagggaggcctgancagagggcaccctccgagtggggtcccgagggctgcaaagtcttcagtacttgtccctcacagcaaacctgcccggcggccgcccaagggcgaattccanacacttgnnggccgttactannggatccaanctcggnnccaacttggcgtaatcntggnata

SEQ ID NO: 784 - DNA, 166 bp, Homo sapiens
attgatgaccacagagctgggaaaattgttgtgaacctcacaggcaggctaaacaagtgtggggtgatcagccccagatttgacgtgcaactcaaagacctggaaaaatggcagaataatctgcttccatcccgccagtttggtttcattgtactgacaacctcag

SEQ ID NO: 785 - DNA, 196 bp, Homo sapiens
tttggcatgattcttagtcatacttgaacttgtctcattccacctcttctcagagcaactcttcctttgggaaaagagttcttcagatcatagaccaaaaaagtcataccttcgaggtggtagcagtagattccaggaggagaagggtacttgctaggtatcctgggtcagtggcggtgcaaactggtttcctcag

SEQ ID NO: 786 - DNA, 148 bp, Homo sapiens
  misc_feature (1)...(148): n = A,T,C or G
gccttaacctggcctggatgcctaccaggccccaccaacacctaactgntggatattataatggcatggtggtnntctggaaccttcccactaactcacccctgcannggatacggntctctgatggntccttaaagctntacccctt

SEQ ID NO: 787 - DNA, 179 bp, Homo sapiens
aaacagacctgtagtgactgaggtgtggtttaggacttcaaggttggatggcccaggcgggaaacagagtggagagctcagtaggccgtctgagactgctgctggcggtagccaccgcggcgcatgtagccctcgtttttgcggtagccgtccttctggtctcgacctgcccgggggcc

SEQ ID NO: 788 - DNA, 570 bp, Homo sapiens
  misc_feature (1)...(570): n = A,T,C or G
ccagcttctggctgtgttttcacatgccatatgacatcatttaaccttaattactttcttactccaaattcaatcacactaggagttagggtttcaacatacgaattcgtgggggacacaattcagtccacagcatcctgtaatgttctatgacgtaagcaagaagtcagatgtgtttgccttctactcctgcattctctgagaaggaatcccagtcccagactcttgaactctaatttcactgaatagaagcaattaactaggctctgaggcagaggaagaaagaggacctgggatgaagactgaaaggtcactgatggctggggaganggaagaaagtctgaaaggagangctcaggcaaggcagatcaattcggataggcacttanagaaaaatcttgcccctgcccaagaactgatgcatctaacctaaaacctcttttccagtanaagntgtctgnccatctttcaccnctaatggnaaacnaggnagatgccttttcctgcccggcggcgtcaaaggngaatccacccccncgcgtctagggatcactcgncactgggganatg

SEQ ID NO: 789 - DNA, 154 bp, Homo sapiens
cgggtggctcaggagcttgacaagcccactgtggagtggggagcaggagaggaaggggtactggttagtctcctaggggctgagtggagtattgttgccctgcctatatcccctaaaggtggagggtagagcggagggttagcagtcaccttcc

SEQ ID NO: 790 - DNA, 129 bp, Homo sapiens
ctgccaaggagaccctgttatgctgtggggactggctggggcatggcaggcggctctggcttcccacccttctgttctgagatgggggtggtgggcagtatctcatctttgggttccacaatgctcacg

SEQ ID NO: 791 - DNA, 177 bp, Homo sapiens
ctgcttaagctggcccacaagtacagaccagagacaaagcaagagaagaagcagagactgttggcccgggccgagaagaaggctgctggcaaaggggacgtcccaacgaagagaccacctgtccttcgagcaggagttaacaccgtcaccaccttggtggagaacaagaaagctcag

SEQ ID NO: 792 - DNA, 366 bp, Homo sapiens
ccagtttggtgtcggtttctattccgccttccttgtagcagataaggttattgtcacttcaaaacacaacaacgatacccagcacatctgggagtctgactccaatgaattttctgtaattgctgacccaagaggaaacactctaggacggggaacgacaattacccttgtcttaaaagaagaagcatctgattacctcgaattggatacaattaaaaatctcgtcaaaaaatattcacagttcataaactttcctatttatgtatggagcagcaagactgaaactgttgaggagcccatggaggaagaagaagcagccaaagaagagaaagaagaatctgatgatgaagctgcagtagagaaaaa

SEQ ID NO: 793 - DNA, 289 bp, Homo sapiens
ctgttgcagcatccagttcatcttaagaatgtcaacgattagtcatgcaataaatgttctggttttaaagaaattacataaaaggccttagtagtcttagaaatgttttggaggcttttagtgaaatgtcatttcaggcctagtggtccgaatctgccctcctgcggtccatgcgatgccctgctgaggtctgtgaacacagctcatgagaaaccacggaaatggcccgaatgtgcttacgtgtgaaaatactgatactgtgattcaacagagctgtttttcaagccag

SEQ ID NO: 794 - DNA, 311 bp, Homo sapiens
caaggccatttttgctggctataagcggggtctccggaaccaaagggagcacacagctcttcttaaaattgaaggtgtttacgcccgagatgaaacagaattctatttgggcaagagatgcgcttatgtatataaagcaaagaacaacacagtcactcctggcggcaaaccaaacaaaaccagagtcatctggggaaaagtaactcgggcccatggaaacagtggcatggttcgtgccaaattccgaagcaatcttcctgctaaggccattggacacagaatccgagtgatgctgtacccctcaaggattt

SEQ ID NO: 795 - DNA, 551 bp, Homo sapiens
  misc_feature (1)...(551): n = A,T,C or G
ctgaaaaatgacaggctagggacatagaatattgtgaactttatactgttagaatcactgtccattaaatgatcactagctaatggtcactaaatttacaaattaaggaaattatatatagaatactgcaaaaacacagtaaaaagactgaagttcgcccatttctgctcaggaagtctcttcactcctaagcttcatatgttgtccttctggcttcaaaatttctgctattattactgtttttcctccttttgatcttccttttgttccccagtgccagaacttccagagccttctcgctcagatgccatctttttgtatgccatttcgagcagcttcagtgatgcctgctgaaaanaagatgctgnctgtctaatattttctccggttcgctgncttttctagccnngaagctccctcattttggaaatctcttcttttanctggtgcactcatcacangggaatnggccctggaatcntccatcttgggtctggggcgaacctgcccggcggccgtcnaaggggaattccccccctnnngccgtccta

SEQ ID NO: 796 - DNA, 204 bp, Homo sapiens
  misc_feature (1)...(204): n = A,T,C or G
ctgtggaggagggtttcagaggagagaggtcggagagcagaggcctgagaagccagaggcaggtggagagagggtggaaagtgagcagcgggctgggctggagccgcacacgctctcctcccatgttaaatagcacctttagaaaaattcacaagtccccatccacaaaaaaaaanaaaaacnnaaacttttcggggantaaaa

SEQ ID NO: 797 - DNA, 142 bp, Homo sapiens
aggtaaagtgaatgtgatgttggagagagtgggaaggaaaagtaatggcaagtatgcttgctcattaccaggcactgtgctaagctctgtgaatacacagataagtaaaatccacgctgtttctcaaagaactcacaatctg

SEQ ID NO: 798 - DNA, 455 bp, Homo sapiens
  misc_feature (1)...(455): n = A,T,C or G
ctggcaggacctgaaggatcacatgcgagaagctggggatgtctgttatgctgatgtgcagaaggatggagtggggatggtcgagtatctcagaaaagaagacatggaatatgccctgcataaactggatgacaccaaattccgctctcatgagggtgaaacttcctacatccgagtttatcctgagagaagcaccagctatggctactcacggtctcggtctgggtcaaggggccgtgactctccataccaaagcaggggttccccacactacttctctcctttcaggccctactgagacaggtgatgggaattttttctttattttttaggttaactgagctgctttgtgctcagaatctacattccagattgaggatttaatgtcttangaaatttttttaattttttttttttaccctgccccggncggccntcnaaanggggaaattccc

SEQ ID NO: 799 - DNA, 433 bp, Homo sapiens
  misc_feature (1)...(433): n = A,T,C or G
ctgaagcaagggtgctggggccccatggccttcagccctggctgagcaactgggctgtagggcagggccacttcctgaggtcaggtcttggtaggtgcctgcatctgtctgccttctggctgacaatcctggaaatctgttctccagaatccaggccaaaaagttcacagtcaaatggggaggggtattcttcatgcaggagaccccaggccctggaggctgcaacatacctcaatcctgtcccaggccggatcctcctgaagcccttttcgcagcactgctatcctccaaagccattgtaaatgtgtgtacagtgtgtataaaccttcttcttctttttttttttttacctcccggcccccctcaaaaggggaattccacacactgggggcggtactanggatccaactcggnccaacttggngaaaaatgg

SEQ ID NO: 800 - DNA, 506 bp, Homo sapiens
  misc_feature (1)...(506): n = A,T,C or G
ctggctttgcagtcatgcataaaggtgaggacacttaattcaaggcatctgggggctggtgtcaccgcacatgaagagtagtgcccatgctgtcccacgagcttccttgggaaaagggaaaaacaaatcttttcctcaaatagaattgtcgcaggaaagagccatgacattttattcactgtttaatcatcgggtggcaggatttctttgaagtagaatctggtagtacccctcccaatctttgctggatcacttctaaatggtgaatatactctgtcaaggaatgttctggatcttgagaagcagtcagggatctttctaatcttgaatttggggatggagtggctcttcccccctgtgtggggaggctgcttgctgccatctgccggcctctggcagggtccctggtgtggacctgccccggcnggccctcgaaanggcgaaatncacacacttngcggccgtctantggatccaactcggacccacctggcgnaactggcata

SEQ ID NO: 801 - DNA, 181 bp, Homo sapiens
cggcaagtccctgtactattatatccagcaagacactaagggcgactaccagaaagcgctgctgtacctgtgtggtggagatgactgaagcccgacacggcctgagcgtccagaaatggtgctcaccatgcttccagctaacaggtctagaaaaccagcttgcgaataacagtccccgtgg

SEQ ID NO: 802 - DNA, 109 bp, Homo sapiens
ctgcaggctattacctgaaaaagacaaggcagttatattaggttctcgtgtaaatatgaatatacaatcaagtcaagctcctgacaaattatacatcaaggatgtatat

SEQ ID NO: 803 - DNA, 384 bp, Homo sapiens
  misc_feature (1)...(384): n = A,T,C or G
ccaggctggtgtcgaactcctgggctcaagccattgcccacctcaaagtgctgggattacaagtgtgagccaccacacccaaccaggttatttgaacatttttaagtactgtattttctctattgtaatattgactgtcatctctgtgcaggttttttagtggttgctctaggttgaaaccctttgaattcttaggtatctaagagtgagcattttctttttttgactgctatactctcaccagttgccagcttctcatataaatattgtaaatgctctcgtttaggtaactcagcttctggagttgagggaacttcaaaatcagaagagctctgggaatctgcatttgtgctaagatttancaaactttacctgccgggcggg

SEQ ID NO: 804 - DNA, 267 bp, Homo sapiens
agagctgaccgctgaggacctgacgcagatgggaatcacactgcccgggcaccagaagcgcattctttgcagtattcagggattcaaggactgatccctcctctcaccccatgcccaatcagggtgcaaggagcaaggacggggccaaggtcgctcatggtcactccctgcgccccttcccacaacctgccagactaggctatcggtgctgcttctgcccactttcaggagaaccctgctctgcaccccagaaaacctctttgtttt

SEQ ID NO: 805 - DNA, 251 bp, Homo sapiens
aaaatccccatgcctgtggctgcgcttcctatttctagggctgggaagcactccttgcatcaaggggtcacttacagaacaaagaatcttttgggggaaacttcctctaaaaccctctcatatatagacagctttgactggagggtccatttttcttccaggatggtgttactgcagttgaaagggcaatatgaagttactttcttaatgtgacctagcaataggcatagctacgtggcactatattctgg

SEQ ID NO: 806 - DNA, 282 bp, Homo sapiens
gcctttttatccaaccctaagattacttcacaaatatccttttatcctgccacaccagcaggttgataaaggagccatcaaatttgtactcagtggagcaaatatcatgtgtccaggcttaacttctcctggagctaagctttaccctgctgcagtagataccattgttgctatcatggcagaaggaaaacagcatgctctatgtgttggagtcatgaagatgtctgcagaagacattgagaaagtcaacaaaggaattggcattgaaaatatccattattt

SEQ ID NO: 807 - DNA, 487 bp, Homo sapiens
  misc_feature (1)...(487): n = A,T,C or G
ccactcactctcggacgtagaccctggtgcacacaacgtcatccgccgtcatggtcaggatcagttccccatcgttggtcagttctctggtccacgaggtcttggggccctctcccttcaggagcttctgctcacagaccattttattctcactctcccatttcaccaggctcttacagggcctcccatccacagtctgctcctcaaactcctccccaaccttgaagttaatctctgtggtgcgcacggtggtggaggttttgatgtagaaagtgtctccctcctgtttgatctccactgctggcttggacgctgcagccacagcaatcttcctcagcatcacattcacccccagcactttgagcaattctcgaagttttccgatcggatgattttccagttgccaganaaattgggcatggtggcggcncgggaagcggnccccgtagactnctangctggagcacttggacactgtnttttaatt

SEQ ID NO: 808 - DNA, 269 bp, Homo sapiens
  misc_feature (1)...(269): n = A,T,C or G
catctacaaccctgaagtgcttgatatcacanaggaaactctgcattctcgcttcctggagggtgtccgcaatgttgccagtgtctgtctgcagattggctacccaactgttgcatcagtaccccattctatcatcaacgggtacaaacgagtcctggccttgtctgtggagacggattacaccttcccacttgctgaaaaggtcaaggccttcttggctgatccatctgcctttgtggctgctgcccctgtggctgctgccaccacag

SEQ ID NO: 809 - DNA, 219 bp, Homo sapiens
aaaaatctaatctgccagtttagcgttttccaccaactcggggagctgaaactttcacaggcttcacaatcttttgcttaggtgctgcctttgtaggtgccttagcagcagccattgcagtctttttagatgcttgcttagtcttttttgcttccttagcagccctgatagcttgttctcgttgagcctttctaacttcaggtttctgattcctcttgg

SEQ ID NO: 810 - DNA, 360 bp, Homo sapiens
  misc_feature (1)...(360): n = A,T,C or G
ctgacacagtcagaactcagcagctaccatagaaaagagaagcagctctacctgggcatgtttggttaacaaagaagaaagatgctcctccagttgaacttaggtggaccattaaacatgcatgaaggagaaatctgagcctcagcaagagaaattaaccctatacctctgacccaggtggatttttgtttctagttctgcacaaacttcactacttagacagtctgagtctttttctgtctatccatctgtttatttctatacctttcaatacatgttattgttgcagatatttggcttgagaaatataatcananaacataaaaaaaaaaaaancctgcccggggcgccccgntcgaa

SEQ ID NO: 811 - DNA, 225 bp, Homo sapiens
  misc_feature (1)...(225): n = A,T,C or G
ctgaaacagcatcaagttttcaaagaattaagagcctcngggaggggacccgctttcaagatactgaaggtgacatcaagagtctcctcctaacaggaccaactctatctaaaagttgcttacgagtaactngaatcttgtgtaatagcctacatctcacagaccatcagggatgagnnagaacactgtngttgatggnccgggatgaagagagggtnaacaaaa

SEQ ID NO: 812 - DNA, 340 bp, Homo sapiens
ggaaaatgtcaacctttgtaagaaaaccaaaataaaaattgaaaaataaaaaccataaacatttgcaccacttgtggcttttgaatatcttccacagagggaagtttaaaacccaaacttccaaaggtttaaactacctcaaaacactttcccatgagtgtgatccacattgttaggtgctgacctagacagagatgaactgaggtccttgttttgtttcgttcataatacaaaggtgctaattaatagtatttcagatacttgaagaatgttgatggtgctagaagaatttgagaagaaatactcctgtattgagttgtatcgtgtgggtgtatttttt

SEQ ID NO: 813 - DNA, 249 bp, Homo sapiens
attttgtaactgtaaagatgaatgtcagttgttatttattgaaatgatttcacagtgtgtggtcaacatttctcatgttgaagctttaagaactaaaatgttctaaatatcccttggacattttatgtctttcttgtaaggcatactgccttgtttaatgttaattatgcagtgtttccctctgtgttagagcagagaggtttcgatatttattgatgttttcacaaagaacaggaaaataaaatattt

SEQ ID NO: 814 - DNA, 615 bp, Homo sapiens
  misc_feature (1)...(615): n = A,T,C or G
ccagaagcaggtattcaaagcagagaacaatccctgggtgacccccattgcagaccagttccagcttggcgtgtcccatgtttttgagtatatccgttctgagacatacaaatacctctacggcagacacatgcaggccaacccagaaccaccgaagaagaataatgacaaatcgaaaaagatcagccggaaacccctggcagccaagaacagataaggaagggattggcatcggctggccttccagcaccttctctctccaacacttcattctctcttgccctgtctctcaaataaacccaatgctgcgtgtgaggccttttttatttttcttttcactctctttctaatgctttccaccttaccttttagattcttttgctaggtgggagattgttataaggtctttaaaccatttccatttgttctttaacattaccaaaagcaggggaacaaaagctcttattcaactgcgaaattccataatgggctctggctttcttgaataaaaatcacaanggtgctttnttnttaaaagaataattaaaatctgtaacccttttncctgcccgggggccccctttaanggngaaattcagcacccttnggggcgtt

SEQ ID NO: 815 - DNA, 309 bp, Homo sapiens
ccactacgataagcaggtagctgggttttgtagtgagcttgctccttaagttacaggaactctccttataatagacacttcattttcctagtccatccctcatgaaaaatgactgaccactgctgggcagcaggagggatgatgaccaactaattcccaaaccccagtctcattggtaccagccttggggaaccacctacacttgagccacaattggttttgaagtgcatttacaaggtttgtctattttcagttctttactttttacatgctgacacatacatacactgcctaaatagatctctttca

SEQ ID NO: 816 - DNA, 284 bp, Homo sapiens
  misc_feature (1)...(284): n = A,T,C or G
ccctcctcggcttccttcctctctgcaatgaccttcaacaaccggccaccagatgtcagccctactcacctgagcgctcagcttcaagaaattactggaaggcttccactagggtccaccaggagttctcccaccacctcaccagtttccaggtggtaagcaccaggacgccctcgaggttgctctgggatccccccacagcccctggtcagtctgcccttgtcactggtctgaggtcattaaaattacattgaggntccgaaaaaaaaaacctgcccggcggc

SEQ ID NO: 817 - DNA, 512 bp, Homo sapiens
  misc_feature (1)...(512): n = A,T,C or G
ccaatcaataagggactttcctctctgccattaagagcaacgatgctgaccacatactctgtgcctggagtgaggttggtgagggtgatggaattccgagagtggggcacccgatcttctcgaggtctcccactgaagtgctcgggatgatggcggatcctgtagccagtgatggtggctcgaggagcaatccagtgcacagtaaaagagttggcagtaatatcagaaaagtcaatgccagttggggaatcaagacctgtttttcccacccgggggaggaagagaaaaaaaaaagaaaagacccccccagtttaggaagtgaggaaggtgtaggggaaattaacgtacatccaacatttcgttccttgtctcatcaatccatgatttgccntaaaccaaanagtaanaagtnctgattctaanctacatatgaattttaccttcggccgcgaccccncttangggcgaattccaccnccctngcggccggtncttannggatcccanctcgg

SEQ ID NO: 818 - DNA, 214 bp, Homo sapiens
ctgagattcaagtgcctgacctggaagccgatctccaggagctatgtcagacaaagactggggatggatgtgaaggtggtactgatgtcaaggggaagattctaccaaaagcagagcactttaaaatgccagaagcaggtgaagggaaatcacaggtttaaaggaagataagctgaaacaacacaaactgtttttatattagatattttacttt

SEQ ID NO: 819 - DNA, 518 bp, Homo sapiens
  misc_feature (1)...(518): n = A,T,C or G
aaaacccaaacttccaaaggtttaaactacctcaaaacactttcccatgagtgtgatccacattgttaggtgctgacctagacagagatgaactgaggtccttgttttgttttgttcataatacaaaggngctaattaatagtatttcagatacttgaagaatgttgatggtgctagaagaatttgagaagaaatactcctgtattgagttgtatcgtgtggtgtattttttaaaaaatttgatttagcattcatattttccatcttattcccaattaaaagtatgcagattatttgcccaaagttgtcctcttcttcagattcancatttgttctttgccagnctcattttcatcttcttcatgggtcacagaaactttgnttcttgggcaagcngaaaaataaattgtcctatttttattttgagaaggntacctcgggccgcgcccnctaaggngaattcnnccactgggggcgttctaggggatccnactccggnccancttggnggaatntgg

SEQ ID NO: 820 - DNA, 375 bp, Homo sapiens
ctccaggcgccctcggccgcccatcatggttaattctgtccaacaaacacacacgggtagattgctggcctgttgtaggtggtagggacacagatgaccgacctggtcactcctcctgccaacattcagtctggtatgtgaggcgtgcgtgaagcaagaactcctggagctacagggacagggagccatcattcctgcctgggaatcctggaagacttcctgcaggagtcagcgttcaatcttgaccttgaagatgggaaggatgttctttttacgtaccaattcttttgtcttttgatattaaaaagaagtacatgttcattgtagagaatttggaaactgtagaagagaatcaagaagaaaaataaaaatcag

SEQ ID NO: 821 - DNA, 143 bp, Homo sapiens
gcccaaagttgtcctcttcttcagattcagcatttgttctttgccagtctcattttcatcttcttccatggttccacagaagctttgtttcttgggcaagcagaaaaattaaattgtacctattttgtatatgtgagatgttt

SEQ ID NO: 822 - DNA, 182 bp, Homo sapiens
aaaaaaggaccgttgagaaaggggtggagtataaggaaaccgcaagtgagagggagtactctagtggggtgggggtgccgatacacagctaggcttaaggggccagggaaggaagtggtgccagaatcctagagatagtcatgattacgcaagagttgcccggcaggagagtccatagcaac

SEQ ID NO: 823 - DNA, 300 bp, Homo sapiens
  misc_feature (1)...(300): n = A,T,C or G
ccaccccggagatgacacgaggctcacatgactctagacacttggtggaaagtgaggcgagaaaaacaatgacttgggccaattacacgactgcaaagctagagctgccaacagggctccagggagcttggcttctgtagaagttctaaggaagcggtacgaactccacggcggnggggcgctaactagcagggacccctgcaagtgttggtcgggggcctcgagctgcctgagctgacacgaggggaggggtctgtgtagcacctgccgggcggcgctngaaagggncaattcaccact

SEQ ID NO: 824 - DNA, 627 bp, Homo sapiens
  misc_feature (1)...(627): n = A,T,C or G
aaaccaactttgtgatttttattgatgggcgacaactttatactcctagatatcactaaactgtgtacaattagggacgcagcattagagaagagcagacagcagaattaaacagagcagactgaaggagagatcttcattatttgcccatttttcattatgtgtacacagaagcatgaatgcaatttgaaatcttttaatggcaataaagttacaatcacccatctatgtagactaacattttaactccaaatatttgatctgcaatgtgtacgtaagcagtttctctcagtacaattattaaaatttttcctgttaggaaccagcaacttattttttatgtttatttttcttttgaagtaagaactangttcttctttgataactggctcatttttatcatttatcaaaaactaaagggnagggaagaaaaagtgtgatggattaaaaaatttcttttttaaggaaagataaaattcattttcacaaatttaccaatggttgtgctggngcagggattatttttctanctggcccgggnggggcgctcnaanggngaaattcnncccctttggnggcgnttctagngggatccagcttggnncccaanttgggggaataaagggg

SEQ ID NO: 825 - DNA, 501 bp, Homo sapiens
  misc_feature (1)...(501): n = A,T,C or G
aaatggtatctcttagtaacttgcactcgttaaagaaacacggagctgggccatcgtcagaactaagtcagggaaggagatggatgagaaggccagaatcattcctagtacatttgctaacactttattgagaaattgaccatgaattaatggactcatcttaatttcttctaagtccatatatagatagatatctatctgtacagatttctatttatccatagataggtatctatacatacacatctcaagtgcatctattcccactctcattaatccatcatgttcctaaatttttgtaatcttactgtaaaaaaaagtgcactgaacttcaaaacaaaacaaaaaacaacacnacaaaaacaagtccaactgatatatcctatatctgttaaaattcaaaagtgaacnaagctttaactggcctcggccgcaccccctaaggcaattcnacccctngggcgtctantgatccactcgnaccactggngatatgctact

SEQ ID NO: 826 - DNA, 679 bp, Homo sapiens
  misc_feature (1)...(679): n = A,T,C or G
aaaattttagaagttaagacttacgaccacctcagtatatgccattcctaatagaaggaggtatgacggtttcaaactcgtgcagagctgcattttcatttacaagtctctgtaggcactttagaagtgaagcttggcttcaaaatacaaacactgggggctttggctcaaccttttaatataaaaaaattcactgatgtacaaaaatttgaaagtgtgacaatgacaattatgaaatcctgtgactgaaagtcccctcgagtgcactctgtggtgcacatgcgcccgcccacacaaactctggcatggaaacataaactaatgcaaaccagtgctacccagaagcaccaacacgtgtgttctccattccaccaatcacagaccagtatctactccaaacatccagtaacgaaaactatggcatcttcccaggaacagcaaggcaggcttcttactcacgatgaaccagcacgaataaaccccccaaaaaganaactgctacttaaattagganagtcattctgangatcggcccaattcccatttaggaacaaatttttctgaatttcaaantcgggnactttagaaanttttttcttntttctaaaananacctcggcgggacnccttnggggaatccncncctgnggcgtctanggtncaattngnccccctgggg

SEQ ID NO: 827 - DNA, 453 bp, Homo sapiens
  misc_feature (1)...(453): n = A,T,C or G
ctgattaatcattgtngatgactgcagtttttcccatccttcccgatttacatctgttcaggccaattcaaatatggtgagtaaatgaattagacatgcaaattcaagccccaggctagaaagagggagagagaggaaaagagagagaaagagagagagcgcgcgcatggctgaaatcctaggcgagaagaaagattcttctgcctgatagttattttaatgctctaaaaatcctgcaaatcagaccttcctgtcccttgcaggataactgtaaggctttttaatgtaaggaggcttctggaggaagtgaagagctatggaaacaacacacatagtgtggaaaaatttcacattttttttacctcggccgcgaccacgctnagggcgaattccagccacttggcggncgttctagtggatccnactcggaccancttggcgtaatcatggcta

SEQ ID NO: 828 - DNA, 562 bp, Homo sapiens
  misc_feature (1)...(562): n = A,T,C or G
ccaggatctttggagccccgccaccctcagagagcatggagggaccttcccttgtcagggactcctgagggcctgggtggccccttccatttcctggccctgctctgcttcctgtctacctcatactagaatgatcgtgactacccgggcagacattttactgtgtttctcagaccaagtgtctactgatggcccaaacatggagttttgtgggcttccactgtccccactccgaactcctgtatgtgcctggctgagtcacctaattcatactgtcatactagcataattatgactattgcatatgcttgttttgtttgactcttggctgctacgtcttgtagggcccctgaaaatccacttnctgccccagaaagggctttatttccactaggaggatatgcctanncaggcatctttctctgttacaatcacaggngaggnggattaacatctttttattaaaaacatnattaatgggggactgggtggganaaactttctaatgattntnaaaaaaaaattttttngctttactgccggcggcctcnaaggggaatcc

SEQ ID NO: 829 - DNA, 263 bp, Homo sapiens
  misc_feature (1)...(263): n = A,T,C or G
ccttggttacacaactccagnaaccgggccccaaatccactatctgtgcaatgcagcacatgcgcacaatgctattaaactgctcttgganaaattccaggtttgtccggatgatgtccacacctggctgaacctgcaccaaggaaaaactctcccgcacatactcttctagccccgtgatcaatgtgtgggttgccatccggatgttactgggtgtgggctcctgaccacccaggtagtgcttggtggaagaaggatcgcaa

SEQ ID NO: 830 - DNA, 301 bp, Homo sapiens
  misc_feature (1)...(301): n = A,T,C or G
gaagctgatggggtcaaatgaaggtgaattcaaggctgaaggaaatagcaaattcacctacacagttctggaggatggttgcacgaaacacactggggaatggagcaaaacagtctttgaatatcgaacacgcaaggctgtgagactacctattgtagatattgcaccctatgacattggnggncctgatnaaaaattgggtggcccttggcctctgtttgntttttataaaccaanctctatctnaaancccaacaaaaaaaattcncnccatatgggcccctcttgtaataatnttgac

SEQ ID NO: 831 - DNA, 430 bp, Homo sapiens
  misc_feature (1)...(430): n = A,T,C or G
aaataggtagaaactttatttcctaaatccctccctggacctctttcagaaggcagttcaaatgcactgtaggtagaaggcagaggaagcccttatttagcaatgcagaacttggcagaggccccacatctgtcattcttcacagcagtcccttcccacatgctagagggaaggggaagcatgatagggaggtccacttttgtggactcaaaccttgatggggatgttgagcagtcacaacgcttctcagaaaaggcacaancaccccanacattcagcccggaaaacaagctggctcacaggcttccnatcgggtgttcaaccttcttcggaacaaggcccagactgnccggcggccgtcnaaggcgaatncaccactggcgccgtctatggatccactcgtccaacttgcgaatatggcatanttttc

SEQ ID NO: 832 - DNA, 373 bp, Homo sapiens
caacagtcgctccctggacctggacggcatcatcgctgaggccaaggcgcagtatgaggagatggccaaatgcagccgggctgaggctgaagcctggtaccagaccaagtttgagaccctccaggcccaggctgggaagcatggggacgacctccggaatacccggaatgagatttcagagatgaaccgggccatccagaggctgcaggctgagatcgaaaacatcaagaaccagcgtgccaagttggaggccgccattgccgaggctgaggagcgtggggagctggcgctcaaggatgctcgtgccaagcaggaggagctggaagcccgccctgcagcgggccaagcaggatatggcacggcagacctgccc

SEQ ID NO: 833 - DNA, 366 bp, Homo sapiens
  misc_feature (1)...(366): n = A,T,C or G
gcaagacagtgattgaatacaaaaccaccaagacctcccgcctgcccatcatcgatgtggcccccttggacgttggtgccccagaccaggaattcggcttcgacgttggccctgtctgcttcctgtaaactccctccatcccaacctggctccctcccacccaaccaactttccccccaacccggaaacagacaagcaacccaaactgaacccccccaaaagccaaaaaatgggagacaatttcacatggactttggaaaatatttttttcctttgcattcatctctcaaacttagtttttatctttgaccaacccgaacatgaccaaaaaccaaaagtgcattcaaccttacccnnnaaaaaaaa

SEQ ID NO: 834 - DNA, 523 bp, Homo sapiens
  misc_feature (1)...(523): n = A,T,C or G
aaatgttaatacaacaggatttttttttctttttgtaagagaaagcaaatctgtacaaaaatactctggttgcaagaaaagctagggcacactgttcaactaagagtagtttagctgttggaaaaataagagcatttaattttatctaaaaatatgtataaatcccctcaaaatggtaatgaatcatacacagtacatactaaaaatatttaaaatagagaatattcctcacagaggacttttttctttaattactgctaaaaaaataattacaaagtccaaacaggcagagagatttagcacactgatcacacgattctccatcatcctccacgcttgctctgaagagggtttaaaaagtccagtttctcgttgatttcgctgctccatttagccaaggttggctggacctgcccgggcgccncttcgaaagggcnaattcccacccactggcgggccgttactaatggatnccaactccgnnccaantttgggngnaatntgggcataactngttcctggg

SEQ ID NO: 835 - DNA, 238 bp, Homo sapiens
aaaaatccatgacaccttgatagaaattagagtttacacaaacaaaaaaggaaccttcgatattgccagcagctataaagtgaacgtactgagaccgacaggacagcaagaaggcatttgcacatttatatctgacacccgaccatactttcagtcaccagaatatcttctctccagatttaaaaaaatagtatgctgatttctataacaaagctttttttcgtacaaaaatcaaata

SEQ ID NO: 836 - DNA, 671 bp, Homo sapiens
  misc_feature (1)...(671): n = A,T,C or G
ccaactatgcctctcanaacatcacctaccactgcaagaacagcattgcatacatggatgaggagactggcaacctgaaaaaggctgtcattctacagggctctaatgatgttgaacttgttgctgagggcaacagcaggttcacttacactgttcttgtagatggctgctctaaaaagacaaatgaatggggaaagacaatcattgaatacaaaacaaataagccatcacgcctgcccttccttgatattgcacctttggacatcggtggtgctgaccaggaattctttgtggacattggcccagtctgtttcaaataaatgaactcaatctaaattaaaaaagaaagaaatttgaaaaaactttctctttgccatttcttcttcttcttttttaactgaaagctgaatccttccatttcttctgcacatctacttgcttaaattgngggcaaaaganaaaaagaaggattgatcanancattgggcatacagttcattaacttcttcccccttccccaaaattnaattttttnaaccccttaccctntatggaaaagnaacctttnngaaaccccaatnaaattgnaaannaaaccctaacttnccncttgggttttaattttccaaaggaaattcctcccgngggcttnaaagggaaaccccctgggg

SEQ ID NO: 837 - DNA, 267 bp, Homo sapiens
  misc_feature (1)...(267): n = A,T,C or G
tacangaacaactgntacacattcnaagaacangnattcnctgcantctcntgatntgacctnatggganggacagganaatgagancactctnccaccacttttcctgccttggatntntatgaggatttgtgnctgctctaattggttattcctatatcatgncctactaaggtacctgcttataggccatgaaaataaaacgccattcaactttttttttgtaaagctaaaataatcacatgatacttattctttggaggattt

SEQ ID NO: 838 - DNA, 63 bp, Homo sapiens
ctgtttcccagcaaagatcaacctctgctggtcaggagggatgccttccttgtcttggatctt

SEQ ID NO: 839 - DNA, 567 bp, Homo sapiens
  misc_feature (1)...(567): n = A,T,C or G
ccaccaacagtttcccagccacatgctgggccctctaggtctctccagcccactctaaggacccaagaaatgcagccacagtccatctctcttttttctctccttccgggggaccaaggtaccttctggggcatacaacatggcagcagggcctcgggaagaggggtaggaggaccgagcagcattctctgtagaggaagacaggaaaggagaccctcttggcgatgaattaatccttgaaggaaatgacattgagcttgtttcaaattcagcggctttgattcagcaagccacaacagttaaaaacaaggatatcaggaaatttttggatggtatctatgtctctgaaaaaggaactgttcaacaggctgatgaataanatctaaganttaccttggctacagaaagaaaatgccanatgaccttaananctacnttgggatatttaccttgccccgggcgggccaanggcgaaatttccacacacttggggggccgntacttannggaatcccaactttnggnacccaanctttgggngaaaanattgggnaatanctttttccc

SEQ ID NO: 840 - DNA, 284 bp, Homo sapiens
aaaggaatggattttgagagaaaacaacgtgggcagaagtatggaatagaaaataaatacaaatgtaggctattctgctaattgttttataaccacgacaaactagtacagagaatgccctgtacaaaacacaacaaaggttcaaacatcgagatgttcccttagcaaggctgaaaatttcagtctctggtatttggaatttaggctgcagtccttgtttttggatggatcactgggtgtgtggcacagtccatgcttttaaccagatttgaacagaagaatgg

SEQ ID NO: 841 - DNA, 340 bp, Homo sapiens
aaacctgatttactagacctgggaattttcaacatggtctaattatttactcaaagacatagatgtgaaaattttaggcaaccttctaaatctttttcaccatggatgaaactataacttaaagaataatacttagaagggttaattggaaatcagagtttgaaataaaacttggaccactttgtatacactcttctcacttgacattttagctatataatatgtactttgagtataacatcaagctttaacaaatatttaaagacaaaaaaatcacgtcagtaaaatactaaaaggctcatttttatatttgttttagatgttttacctgcccggcggc

SEQ ID NO: 842 - DNA, 539 bp, Homo sapiens
  misc_feature (1)...(539): n = A,T,C or G
aaaaatgttttcccgtgggtaattttctattatatattttcatatgggcaaagggaaaaaatgataaatcctctgtaatcacaaaccccaatttcgttttgtttattcagcttctaaaatattgaacacccagacttttaattcaacctttaagaaccttatcatttatgtttcagtagatatcaaagtaatccatgtttgtgtcaaatgatcatagaaaataaatagaagagacagtgaagcaagtaaaaagaaaagcattgttttaatttgtttgcattaatttttttcatttgtcaaaatgcttcttttgttgccacagtaaagaacagtttttattgttttgtaagtaaaattacgtancttattttgtatgtaaagattaatttccataataaaaatattgnatggttactgngatcttaatgggcaggggtaanaaagtatttacctcggccgcgaacacccttagggcgaaattccaccacactggcggggcggtactaatggaatnccaacttcgggnanccaaactttgg

SEQ ID NO: 843 - DNA, 626 bp, Homo sapiens
  misc_feature (1)...(626): n = A,T,C or G
atcagtagagaattcaggatagttttgtttaaattcttgcagattacatgtttttacagtggcctgctattgaggaaaggtattcttctatacaacttgttttaacctttgagaacattgacagaaattatgcaatggtttgttgagatacggacttgatggtgctgtttaatcagtttgcttccaaagtggcctactcaagaggccctaagactggtagaaattaaaaggatttcaaaaactttctattcctttcttaaacctaccagcaaactaggattgtgatagcaatgaatggtatgatgaagaaagtttgaccaaatttgtttttttgttgttgttgttgttttgaatttgaaatcattcttattccctttaagaatgtttatgtatgaagtgtgaagatgctagcgaacctatgctcagatttcatcgtaagtctnccttccctgtacagantttcaaancggcactgatagtatgtatttctttataaaaaaggggtaaaaatacaatgaacttttacctcggccggacacccttanggggaaatccacncactgggggccgtnctaagggatccaacttggncccannttgggnaaaangggcnaanttttcccggg

SEQ ID NO: 844 - DNA, 297 bp, Homo sapiens
aaaaatctaaaagtttattgccagaatagcaaacttcataaagacaccttaaagtacatcgaatatgacaagcaaaataaacagaaaactttgaccaaagaaaagattgccgctgtcatgcacagtcaaattaataccaaaccaaacaagtacatcgaagagtatatgggttatacaatccacactctgaaactaaaggagactcattccaaaatgcttggttttgggttgggggtttgagaggggggctggtgctgggagggtaattttctcctaatacagaatatggaaatattt

SEQ ID NO: 845 - DNA, 580 bp, Homo sapiens
  misc_feature (1)...(580): n = A,T,C or G
ccagttttgattgcaaatgctgtaaagatatagaatgaagtcctgtgaggccttcctatctccaagtctatgtattttctggagaccaaaccagataccagataatcacaaagaaagcttttttaataaggcttaaaccaagaccttgtctagatatttttagtttgttgccaaggtagcactgtgagaaatctcacttggatgttatgtaaggggtgagacacaacagtctgactatgagtgaggaaaatatctgggtcttttcgtcagtttggtgcatttgctgctgctgttgctactgtttgcctcaaacgctgtgtttaaacaacgttaaactcttacctacaaggtggctcttatgtacataagttgntaatacatccaattaatgatgctgacatgctatttttgtagggagaaaaatatgtgctaatgattttttgaanttaaaatatcttttggggaagattgcttaaaaantnccctttttnttncaangcttatcttggacaaacttatgccggcttaaaatattttaaaaaanaaaactggnttggaacaaaaaaaaaaaaaaaaaaaa

SEQ ID NO: 846 - DNA, 345 bp, Homo sapiens
  misc_feature (1)...(345): n = A,T,C or G
atcgccattatccccagcaaaaagctccgcaacaagatagcaggttatgtcacgcatctgatgaagcgaattcagagaggcccagtaagaggtatctccatcaagctgcaggaggaggagagagaaaggagagacaattatgttcctgaggtctcagccttggatcaggagattattgaagtagatcctgacactaaggaaatgctgaagcttttggacttcggcagtctgtccaaccttcaggtcactcagcctacagttgggatgaatttcaaaacgcctcggggacctgtttgaattttttcttgtagtgctgtattattttcaataaatctngggacaaca

SEQ ID NO: 847 - DNA, 71 bp, Homo sapiens
  misc_feature (1)...(71): n = A,T,C or G
ggcagggngganactcaatttgntgangaaanaaaacntccattaaaggataaataaaaacccaatttatt

SEQ ID NO: 848 - DNA, 226 bp, Homo sapiens
ggatactcagtttgttgaggaaataagacgtcaatgaagggataaataagagcacaatttattgcatggtaagtgtcagatgaacagtacaatttgtgctttagaaattcagagaacagaagggtatcattgtagctgggtgcggtggctcacgcctgtaatcccagcactttcagaggccgaggcaggcgggtcacttgagttcaggagttcaagaccagcctgg

SEQ ID NO: 849 - DNA, 237 bp, Homo sapiens
  misc_feature (1)...(237): n = A,T,C or G
gtttaatgtgttgtaagacgtagagtttatctcaagctgttaaaaatggtaatgtacaaatgtgaatagacacttatctatataatatgggtaagttttgtttcgcctataatagatgtttataaaaacaagtgaggggacagttggtctttttatcttttctttctttttctttcttttctttttttctttttttttttttttttttngncccccccgggngcccntttgaaaaaa

SEQ ID NO: 850 - DNA, 190 bp, Homo sapiens
ctgtatcatctagacgcttatatcccgctgcagatcaactctcatgagagcaaggcagccttccaccggaagagaaagcaattaatggtggccacatctcccattagctctagcatgaaacctgtacagacaatgtttgtttcttttgtaaaaagcagtaagttatgcccagtaactaaatgaattcaaa

SEQ ID NO: 851 - DNA, 525 bp, Homo sapiens
  misc_feature (1)...(525): n = A,T,C or G
aaataagtttatgtatacatctgaatgaaaagcaaagctaaatatgtttacagaccaaagtgtgatttcacactgtttttaaatctagcattattcattttgcttcaatcaaaagtggtttcaatattttttttagttggttagaatactttcttcatagtcacattctctcaacctataatttggaatattgttgnggnctnttgntttttctcttagtatagcatttttacctgcccnggcggccgntcnaaanggcgaattccancacacntnacgncttaatttcttttttttcaaanaactaanttctgggggagntgatattcttttcaggttgatacgtcttttcagggactgcaaggggaccataaaggtactaatgntattaatgtgactgacaagtaattagaaactgggaaattaaattttacaaacatttttacctgccccggcnggccctcgaaaggcgaaatncacacactggcggccgtnctannggatccaactnggncccaancttgg

SEQ ID NO: 852 - DNA, 504 bp, Homo sapiens
  misc_feature (1)...(504): n = A,T,C or G
aaacctttggaagtttgggttttaaacttccctctgtggaagatattcaaaagccacaagtggtgcaaatgtttatggtttttatttttcaatttttattttggttttcttacaaaggttgacattttccataacaggtgtaagagtgttgaaaaaaaattcaaatttttgggggagcgggggaaggagttaatgaaactgtattgcacaatgctctgatcaatccttctttttctcttttgcccacaatttaagcaagtagatgtgcagaagaaatggaaggattcagctttcagttaaaaaagaagaagaagaaatggcaaagagaaagttttttcaaatttctttcttttttaatttagattgagttcatttatttgaaaccanactgggccaatgtncacaaanaattcctggtcancaccccccgaacttgcccngggcgggcccttaagggcgaaattccnccacactggnnggcngttcctaanggaatccnaactt

SEQ ID NO: 853 - DNA, 533 bp, Homo sapiens
  misc_feature (1)...(533): n = A,T,C or G
aactcaaaattgncanatcaactancttngcttttngcctttggaaaactaccattattcaaatttattatgtaatacactcatncagataatgaaacatctgcnaaaagaagtgtgggaatcacctcatctgtgcataaaatggctattatacatgaatgcagacntttgaagttagaaaggaatataactcaaatagcaaaaggtcctaattacagagtttacaaataagcagttgtattttcaaaagtcatantaagtccagactgggctattgccaaagaactaatctttantctacttcaacatgttacatgggattnctgactnttcnnactattaacattttgtgganggtaacttcctaaaggnccccaaaaaacaggaaacattccnggaattaaaggcttcctcttnaaaaaacaagnngggaaaccaatngggcnangaacctttncccgggggggcccntttnaancccctntttnggggnncttttttaaaagggggnaatttccccccnccttgggggg

SEQ ID NO: 854 - DNA, 124 bp, Homo sapiens
ccttaggctggacctaaatagattgatttcatttctaaccatccaattctgcatgtattcataattctatcaagtcatctttgattcctggacctaataaattttttttccctttcaaaaaaaa

SEQ ID NO: 855 - DNA, 240 bp, Homo sapiens
  misc_feature (1)...(240): n = A,T,C or G
cctaccgcagcctgctcgagggacaggaagatcactacaacaatttgtctgcctccaaggtcctctgaggcagcaggctctggggcttctgctgtcctttggagggtgtcttctgggtagagggatgggaaggaagggacccttacccccggctcttctcctgacctgccaataaaaatttatggtccaaaaaaaaaaaaaaaaaaaancntcccgggggggcctttcaaagggggaaat

SEQ ID NO: 856 - DNA, 695 bp, Homo sapiens
  misc_feature (1)...(695): n = A,T,C or G
cctcagcataattcttcaggtgcatctcctaggagagtccgtcatgattcaccagatccctctcctcctaggcgagcccgtcatggttcctcagatatctcttcccccagaagggtccataacaactcccctgacacatctaggaggactcttggctcttcagacacacagcaactcagaagggcccgtcatgactcccctgatttggctcctaatgtcacttattccctgcccagaaccaaaagtggtaaagccccagaaagagcctctagcaagacttctccacattggaaggagtcaggagcctcccacttgtcattcccaaagaacagcaaatatgagtatgaccctgacatctctcctccacnaaaaaagcaagcaaaatcccattttggagacaagaagcacttgattccaaaggtgactgccanaaagcaactgattcaaaactttcttctncccggnataaacnaaatccagggcccaggattcttaattcaaattttnaccttcncggaatanaactaaaaacccggaactttttattntnaacctctnttcccccaggggggaaaaccgaaggancccaannttttttaatttttacctttncccccccccnaaaggaaanaanccttcttggaaaaaaagntttncaacaattttttttgggggctnaaaaagggggggggggt

SEQ ID NO: 857 - DNA, 409 bp, Homo sapiens
ctgccaagatggagaagcatgtgcccctgtagagcgtctccccagaaccagaccccgagccactcgcttcctctgtgctgtgacaacattggtgccaggggagatggtgtttttcaaagggacctactgtagccactttaatttacaattaagagccttagtttgacttaacacttttgtaggcttttcattgtgtatttttgtgtatgtgtgcatatagcagctactctgtagcagaggtgggtagagacacttaatagtatcatgtcgcatgcagatgtcacatcggcctctgcaaaaactgtactgtcttgtttctgcattagacttaagtagtcatgtgaatatactgctatgtcacttttaatattacgagttttatacttggaaaatggtacttgcttctttt

SEQ ID NO: 858 - DNA, 344 bp, Homo sapiens
ggaattctttgtggacattggcccagtctgtttcaaataaatgaactcaatctaaattaaaaaagaaagaaatttgaaaaaactttctctttgccatttcttcttcttcttttttaactgaaagctgaatccttccatttcttctgcacatctacttgcttaaattgtgggcaaaagagaaaaagaaggattgatcagagcattgtgcaatacagtttcattaactccttcccccgctcccccaaaaatttgaatttttttttcaacactcttacacctgttatggaaaatgtcgacctttgtaagaaaaccaaaataaaaattgaaaaataaaaaccgtaaaa

SEQ ID NO: 859 - DNA, 552 bp, Homo sapiens
  misc_feature (1)...(552): n = A,T,C or G
ccggagtccatagcacatattggggatgtgatgtttactgggacagcagatggccgggtcgtaaaacttgaaaatggtgaaatagagaccattgcccggtttggttcgggcccttgcaaaacccgagatgatgagcctgtgtgtgggagacccctgggtatccgtgcagggcccaatgggactctctttgtggccgatgcatacaagggactatttgaagtaaatccctggaaacgtgaagtgaaactgctgctgtcctccgagacacccattgaggggaagaacatgtcctttgtgaatgatcttacagtcactcaggatgggaggaagatttatttcacccgattctagcagcaaatggcaaagacnagactacctgcttctggtgatggagggcacanatnacnggcgcctgctggantatgatactgtgaccagggaaataaaatttttttggaccanaacttnggcccgaacacncttaagggggaatttcaacacacttggcgggccgtacttantggatnccaactnnggncccaancttggggg

SEQ ID NO: 860 - DNA, 148 bp, Homo sapiens
ctggggtggggggatgtagcctacctcgggggactgtctgtcctcaaaacgggctgagaaggcccgtcaggggcccaggtcccacagagaggcctgggatactcccccaacccgaggggcagactgggcagtggggagcccccattgt

SEQ ID NO: 861 - DNA, 592 bp, Homo sapiens
  misc_feature (1)...(592): n = A,T,C or G
cactgttcttgtagatggctgctctaaaaagacaaatgaatggggaaagacaatcattgaatacaaaacaaataagccatcacgcctgcccttccttgatattgcacctttggacatcggtggtgctgaccaggaattctttgtggacattggcccagtctgtttcaaataaatgaactcaatctaaattaaaaagaaagaaatttgaaaaaactttctctttgccatttcttcttcttcttttttaactgaaagctgaatccttccatttcttctgcacatctacttgcttaaattgtgggcaaaagagaaaaagaaggattgatcagagcattgtgcaatacagtttcattaactccttcccccgctcccccaaaaatttgaatttttttttcaacactcttacacctgttatggaaaatgccaacctttgtanaaaccaaaataaaaattgaaaaataaaacctaaacatttgccccttgtggcttttgaatattttcacagaggaaattacctgcccggcggcctccaaaggcgaattcacacctgnggcctntanggaccacttgnnccacttgggnaatatggcta

SEQ ID NO: 862 - DNA, 332 bp, Homo sapiens
  misc_feature (1)...(332): n = A,T,C or G
ataagggctgtttttgctgccccaaaagggcttaacaatttaggcggatagtttacttaaaaaaaaaaaatcctttgganacatactgaaaatgcaaactagtttctaaattatcaattccctacatgaaaaancagtttgccaaagtttagtctcaaaaaatgactggttggctntatttaaatcaaaacccaatttntacncgtgttgaataaggtaacagcctttgatnaatttccttcacaacatggttttagtgaagcaaacatttttttttaagggcattgntctttctagttnatttctttttatgaaataaaattattttattt

SEQ ID NO: 863 - DNA, 297 bp, Homo sapiens
ccttggtttaattgcaggcgcattgaacagtcctgggcactacatgtaaattaagcccaaagatggggagaaaggaaaaggagagacaaatatagtccatactgagagtcatcaacaatccagactgaagtcttctattttaatctcaatccccttttctgatttgccacccatgcctcttcaggctggaaacaatctcttggttccctaaagcactttcttctgactgctgtgattcagtgaaccttgccctttgctttctattacttgtgcatttgcctcacctgacaatgtttt

SEQ ID NO: 864 - DNA, 79 bp, Homo sapiens
gtgtctaaaaatccattccctctgccctgaagcctgagtgagacacatgaagaaaactgtgtttcatttacctcggccg

SEQ ID NO: 865 - DNA, 98 bp, Homo sapiens
tagaaattgagatgcccccccaggccagcaaatgttcctttttgttcaaagtctatttttattccttgatatttttctttttttttttttttttgggg

SEQ ID NO: 866 - DNA, 582 bp, Homo sapiens
  misc_feature (1)...(582): n = A,T,C or G
aaaatatttcccctagttttttggggggataggaagaaagatttgttactgtatttttttaactacataaaaatagatcaataaatgtcagcattggcctctgtgtacaaaccaagagcttttacagatccagaatttattagtttaaaatgcaggtgaacttttttttgcgtttggtttacttgtctgtcaaatgtttccttaaacatgaaactgaataaggagaagagtatttttaacacttaaatttcttggcaaattttaaaacattttttagtctgtaatacactccacttgaagcacttaagtcttccttaaatgacttttcttaagtaatgatactgtgtgttttcccaaagcacttttaaaaaaatttttataaattactatctgttgnaaaaggnggcccttttncctttcttctanaatttttttcttaccaaaatttccctaatctttgaaaggtttggggaaatttaaaatttcaaaatggccaaaaaaccttgacctcantttanccttgccccngggccgggccccttttnaaaaaggggcaaaatttcccannnccctttggggggg

SEQ ID NO: 867 - DNA, 663 bp, Homo sapiens
  misc_feature (1)...(663): n = A,T,C or G
aaacattacccancatcattgtttataatcanaaactntggtccttctgtctggtggcacttanagtcttttgtgccataatgcagcagtatggagggaggattttatggagaaatggggatagtcttcatgaccacaaataaataaaggaaaactaagctgcattgtgggttttgaaaaggttattatacttcttaacaattctttttttcagggacttttctagctgtatgactgttacttgaccttctttgaaaagcattcccaaaatgctctattttagatagattaacattaaccaacataattttttttagatcgagtcagcataaatttctaagtcagcctctagtcgtggttcatctctttcacctgcattttatttggtgtttgtctgaanaaaggaaagaggaaagcaaataccaattgtactatttgtaccaaatctttgggattcattggcaaataatttcagtggtggggtattattaaatanaaaaaaaaattttttttctaaggtnaaggctaattgaaacntttgacttatnannacaattttcctttcaaataaattcnttcnaaaaaatnaaaaaaaaacttgnccnaaccncctaagggnaattcnncactggggcnnttaatggancaaccngncaacntggg

SEQ ID NO: 868 - DNA, 251 bp, Homo sapiens
ggaaaaccaaacatgctttatttcatttttttcacaatttatttaaacatctcacatatacaaaataggtacaatttaatttttctgcttgcccaagaaacaaagcttctgtggaaccatggaagaagatgaaaatgagactggcaaagaacaaatgctgaatctgaagaagaggacaactttgggcaaataatctgcatacttttaattgggaataagatggaaaatatgaatgctaaatcaaatttttt

SEQ ID NO: 869 - DNA, 143 bp, Homo sapiens
aaatgttgaatattcccttgtatggatataccacaattcatttacccatttacttgttgatgacatttgggttgttttagttttgggatattacaaataaagctgctgtgaacatttgtgcaaaaaaaaaaaaaaaaaaaaaa

SEQ ID NO: 870 - DNA, 228 bp, Homo sapiens
  misc_feature (1)...(228): n = A,T,C or G
nngnatgtttttattaaaaaaaattaaagaccttcatggcacaacttcttcccagcacagttatggtttagtcataccaattacaatacaattacaaccaataaagcaaggtggggagggccttctggcttcaaacttaaaaaaaagcagaggaagaggggagggaccacttcaaacaaagtttaaaaaatctttcagagtaattgccaacataacctttcatgttgg

SEQ ID NO: 871 - DNA, 696 bp, Homo sapiens
  misc_feature (1)...(696): n = A,T,C or G
ctgangattagctaatctaagaacttgaagctcccgtttaaggccttgctctgtctcagcacctgttgttcaaggtcttcattgtatttgttaactttttgttctctctctgttgcttcttttacaagctgtttaaggtcagtaatgctttgattttttttggcaatatcagtttccaattcttttaacttggtttcatacattcttgtaaccacaatggatttccagctcttactgtcagcaccttcaagctgtggacctctgctttctgcaaactgcaatctcttaccagtctcttctagttgaactgtcatcttctcatttaatatctctaaattattctttgctatcccgtaatttctctgcacatcagtttcttttttaagttctttacnaacctttcattttcagcaataattttttctgngcctttggtcttggattcatagtgcatgctcaactgatgcccaaaaganctttaagttttctaattcagccttcaattttcattttcctgctcaaaataaccnatttttcactanncaatattcctgaagcttttttnactggtcatttctctctggacttttcacacttttttcattaaacccanggttttttccanttttggaatggnttttcncttttaccaaacctttaaanggacctnccggggggccnttaaagggnaatccc

SEQ ID NO: 872 - DNA, 206 bp, Homo sapiens
ccagataagctaggatgagagcagagactcagtgtgtgggtgtcccttcctgcttccccttcaggtcttggtttgttctgaagggacgttttatagtcactatccacatgccagtgtgaaatgggcatctatgacgtggtcagggtgtccattcctaatcatggggcagatgccacaagcattcagaaaggagtctgaaagggtgg

SEQ ID NO: 873 - DNA, 575 bp, Homo sapiens
  misc_feature (1)...(575): n = A,T,C or G
ttttttttctaaagagaaaaaatttttattgtgatataaaatgcacttataaaatgtccaccagaaggcatgtaatccttcactgctatataaatttactgggaatatgttattcaccatctaggtatgatactgccaactaaaacatactgtaaacgatgagttatactctataacaaatgcatcactgattttcagcaatcattggtttaataataattagtttaagactataatcacatctatattctggaatgtccatttactttaatgtagtgtagtggaatttagagtataattgcacatagatggtacagaaaaacattcacttctaaattattttataccttcatgacaggtagtcttcctgactgaaaataacagcttcagctatggtctgctccaggattcttaatgcaataatttgggtgtatgtgngnctgctacctgacccccatggaacaacttatatntttataaacaangcaaaattttgncagttattttgcatggttacctnncccggcgggcctttaaaaggnaaaatccancaattggggggcnttnttanggaa

SEQ ID NO: 874 - DNA, 226 bp, Homo sapiens
ccactgcctctgcagtatcaaagagaattagtctttccacaaaacaaattttaacagccaatctctggatttctgtagtggctttagtcaggcatatttatcatcatattagcagtgttcagttcctgcccaacatctttatttaatcccaattcaatgcttatggatgctcagctcatgtttaatgttgcaagccccatcttagcccatcttaattcaaacagaa

SEQ ID NO: 875 - DNA, 566 bp, Homo sapiens
  misc_feature (1)...(566): n = A,T,C or G
gtgttattcatggggcagataaacaaaccctgaagagtatacaaaagaaaccatgcaaagcaacgactactttgctacgaagaaagactcctttcctgcatctttcatagttctgttaaatatttttgtacatcgcttctttttcaaaactagttcttaggaacagactcgatgcaagtgtttctgttctgggaggtattggagggaaaaaacaagcaggatggctggaacactgtattgaggaatgaatagaaaggcttccagatgtctaaaagattctttaaactactgaactgttacctaggttaacaaccctgttgagtatttgctgtttgtccagttcaggaatttttgttttgttttgtctatatgtgcggnttttcagaagaaatttaatcagtgtgacagaaaaaaaaatgttttatggtagcttttactttttatgaaaaaaaaattattttgccttttaaattcttttcccccttccccttccaaagtcttgatagccaancgnttttttttggggggaanaaaccggggaaaantctaaccccntttgggntttt

SEQ ID NO: 876 - DNA, 136 bp, Homo sapiens
ctgctacatgcggtggagtgtccacaatttgccggtcatctgaggagccacctcgcttcaggtcaatgactggggcgaggactgtactttgtttcgtcctttggctctttgcctgagtgagagctgccttcttcac

SEQ ID NO: 877 - DNA, 499 bp, Homo sapiens
  misc_feature (1)...(499): n = A,T,C or G
nnaatgttcatgtagaaaattaatgaactataggaatagctctaggagaacaaatgtgctttctgtaaaaaggcagaccagggatgtaatgtttttaatgtttcagaagcctaactttttacacagtggttacatttcacatttcactaatgttgatatttggctgatggttgagcagtttctgaaatacacatttagtgtatggaaatacaagacagctaaagggctgtttggttagcatctcatcttgcattctgatcaattggcaagaaagggagatttcaaaattatatttcttgatggtatcttttcaattaatgtatctgtaaaagtttctttgtaaatactatgtgttctggtgtgtcttaaaattccaaacaaaatgatccctgcatttctgaagatgtttacctcggccgcgaccacgctaagggcgaattcanccacttggcggccgtctaatggatccaactcggaccagcttgcgaatcatggcata

SEQ ID NO: 878 - DNA, 484 bp, Homo sapiens
  misc_feature (1)...(484): n = A,T,C or G
gctgcgagggccgaanctaagctctcacgtctggccgccttcaggctccgcacacacaggaagcaaaagctaaggcagagttgaaaatgtgtttaaccgcggaagggctgaccccacatgcacacagacccttctacaaactctgggagggttttatgggtttttttgattccanatgtttaaggaaatctctgtcctatcactgaccctgggctaaaagaataggaagaaacggncatacgtgacaaaaaatacagactttacaaccagaaaagtcattaaacaaataactactgcaacaaacaagcaaagaaccaaaccccgggaaaaggggcgtanggatcatttttttccagaatttgctaccattattaatatttcttaaacancccanntttancctcggggccgcgaaccaccccttaaggggcgaaatttccagcnccacttgggcgggccgttacttagtgggaatcccaacttc

SEQ ID NO: 879 - DNA, 259 bp, Homo sapiens
aaacttttccttcaagttatgggccacttcaaaaacagtgtggcattgagggtaggcaagtgggagaagggagacctggactgcagagtccagaagccagaactttgaactgtgcttctagctctttccagcagtgagaacttggaaaggtagactctttgcatctcaaccttctcatctttcaaaggggatgaataattccaatcacacaagaaaggactgaacaagatgaacaagatgatcactgtccaggcgccgg

SEQ ID NO: 880 - DNA, 621 bp, Homo sapiens
  misc_feature (1)...(621): n = A,T,C or G
gcgagaatgaagactattctcagcaatcagactgtcgacattccagaaaatgtcgacattactctgaagggacgcacagttatcgtgaagggccccagaggaaccctgcggagggacttcaatcacatcaatgtagaactcagccttcttggaaagaaaaaaaagaggctccgggttgacaaatggtggggtaacagaaaggaactggctaccgttcggactatttgtagtcatgtacagaacatgatcaagggtgttacactgggcttccgttacaagatgaggtctgtgtatgctcacttccccatcaacgttgttatccaggagaatgggtctcttgttgaaatccgaaatttcttgggtgaaaaatatatccgcagggttcggatgagaccaggtgttgcttgttcagtatctcaagcccagaaagatgaattaatccttgaaggaaatgacattgagcttgtttcaaattcaccgnntttgattcagcangccccaccagttaaaaacaaggatatcagggaaatttttggatggnntctatgtttnntgaaaaaggaacttttcngcaggctggnngaataanaanttagaantnccctggntcccnaaaaaaaa

SEQ ID NO: 881 - DNA, 357 bp, Homo sapiens
gccgctctggaccgtctcaaggtgtttgacggcatcccaccgccctacgacaagaaaaagcggatggtggttcctgctgccctcaaggtcgtgcgtctgaagcctacaagaaagtttgcctatctggggcgcctggctcacgaggttggctggaagtaccaggcagtgacagccaccctggaggagaagaggaaagagaaagccaagatccactaccggaagaagaaacagctcatgaggctacggaaacaggccgagaagaacgtggagaagaaaattgacaaatacacagaggtcctcaagacccacggactcctggtctgagcccaataaagactgttaattcctcaaaaaaaa

SEQ ID NO: 882 - DNA, 395 bp, Homo sapiens
  misc_feature (1)...(395): n = A,T,C or G
nnctgctcnctgggcanacataccatgtggctgtggtctgctacctgacgtctcaggtcagagccacctaccatggaagtttcagtacaaagaaatctcagcccccacctccacagccagcaaggtcagcttctagttcaaccatcaatctaatggtgagcacagaaccattggctctcactgaaacagatatatgcaagttgccgaaagacgaaggaacttgcagggatttcatattaaaatggtactatgatccaaacaccaaaagctgtgcaagattctggtatggaggttgtggtggaaacgaaaacaaatttggatcacagaaagaatgtgaaaaggtttgcgctcctgtgctcgccaaacccggagtcatcagtgtgatgggaacctaa

SEQ ID NO: 883 - DNA, 294 bp, Homo sapiens
cgaagacctttgctctgctgctgctgtccctgttcctggcagtgggactaggagagaagaaagagggtcacttcagcgctctcccctccctgcctgttggatctcatgctaaggtgagcagccctcaacctcgaggccccaggtacgcggaagggactttcatcagtgactacagtattgccatggacaagattcaccaacaagactttgtgaactggctgctggcccaaaaggggaagaagaatgactggaaacacaacatcacccagagggaggctcgggcgctggagctgg

SEQ ID NO: 884 - DNA, 252 bp, Homo sapiens
ttcatttgaaaactgagccaaggtgttgactcagactctcacttaggctctgctgtttctcacccttggatgatggagccaaagaggggatgctttgagattctggatcttgacatgcccatcttagaagccagtcaagctatggaactaatgcggaggctgcttgctgtgctggctttgcaacaagacagactgtccccaagagttcctgctgctgctgggggctgggcttccctagatgtcactggacag

SEQ ID NO: 885 - DNA, 218 bp, Homo sapiens
aaaatcctgattttggagacttaaaaccaggttaatggctaagaatgggtaacatgactcttgttggattgttattttttgtttgcaatggggaatttataagaagcatcaagtctctttcttaccaaagtcttgttaggtggtttatagttcttttggctaacaaatcattttggaaataaagattttttactacaaaaaaaaaaaaaaaaaaaaaa

SEQ ID NO: 886 - DNA, 693 bp, Homo sapiens
  misc_feature (1)...(693): n = A,T,C or G
ggaaaaaaaattagaggatgaagccaaaactaacacattctaaagaattgcaaggaaagcaactatgtaattctgttgaaaaaggaaagctcaggaaatactctttttatttcttttgattctagctgtctgcgagcctggctgtggtgcacatggaacctgccatgaacccaacaaatgccaatgtcaagaaggttggcatggaagacactgcaataaaaggtacgaagccagcctcatacatgccctgaggccagcaggcgcccagctcaggcagcacacgccttcacttaaaaaggccgaggagcggcgggatccacctgaatccaattacatctggtgaactccgacatctgaaacgttttaagttacaccaagttcatagcctttgttaacctttcatgtgttgaatgttcaaataatgttcattacacttaagaatctggctgaattttattagcttcattataaatactgactgatatttactcttncctttaagtttttaagncctctgtacatgatggnataaattttcttgtttcagtgntttgggacanattttntttatgtaattgttcnggtaaaatttnngggnggagtgggaaanttttcaaattccatcnttttggggttggggngggggacatnaaaaggtaattgggcaaaatgctnagnccaaaatttganggc

SEQ ID NO: 887 - DNA, 593 bp, Homo sapiens
  misc_feature (1)...(593): n = A,T,C or G
ngcgagagcttcaagagcaaagagtttgtgtctagtgatgagagctcttcgggagagaacaagagcaaaaagaagaggaggaggagcgaggactctgaagaagaagaactagccagtactccccccagctcagaggactcagcgtcaggatccgatgagtagaaacggaggaaggttctctttgcgcttgccttctcacaccccccgactccccacccatattttggtaccagtttctcctcatgaaatgcagtccctggattctgtgccatctgaacatgctctcctgttggtgtgtatgtcactagggcagtggggagacgtcttaactctgctgcttccaaggatggctgtttataatttggggagagatagggtgggaggcaagggcaatgcaggatccaaatcctcatcttactttcccgaccttaangatgtanctgctgcttgtcctgttcaaattgcttggaacagggggtcatgtgaaggccaggancttngnccgngaacccccttaggggggaattccagcncccttggnggccgttncttgtggatcccanctcgggncccancttgggngnaatnatggg

SEQ ID NO: 888 - DNA, 606 bp, Homo sapiens
  misc_feature (1)...(606): n = A,T,C or G
gctnttcttggttccttcagtggtgttggtagtaaaatggtaggtaaaagttaggctgcaagttcaataaatcatgagatttcccatcgttacacccttgtgtattcacatttcttggatcaaacattttgagtgaactaggggtttttattaaagacatttgttgtatttatggttgtaactgtacatgcttatcaggatgagactgaaagaaggtagggcaaaaatggttgaatctattttcagatagtagttcatacttgagtgaagtgtcttgtctgcattatgaagcctggtatgtatccagtactaaataggtgggttaaatgtggtaattctagttcantgtcttaccctgaagagaaagttgtaggttggctgttgaaattcattccttagatatgatcaagtttgattgccccggctttattgcctttacaggaatgtgatactcagggcttactctatacaccaatgagtnttctttgatcctaagaacnccactgaagttggttnaggtctttggacaacatgaataaacttcttcaaaaacttttttttcctttgnaaggaangggnnttgcttcangntactaatnaaaaaaa

SEQ ID NO: 889 - DNA, 481 bp, Homo sapiens
  misc_feature (1)...(481): n = A,T,C or G
ttcaaagcctgtctgcgagcctggctgtggtgcacatggaacctgccatgaacccaacaaatgccaatgtcaagaaggttggcatggaagacactgcaataaaaggtacgaagccagcctcatacatgccctgaggccagcaggcgcccagctcaggcagcacacgccttcacttaaaaaggccgaggagcggcgggatccacctgaatccaattacatctggtgaactccgacatctgaaacgttttaagttacaccaagttcatagcctttgttaacctttcatgtgttgaatgttcaaataatgttcattacacttaagaatactggcctgaattttattagcttcattataaatcactgagctgatatttactcttcttttaagttttctaantacgtctgtancatgatggtatagaatttcttgtttcagtgctttgggacaaatttatattatgtcaaattgatcanggtaaaa

SEQ ID NO: 890 - DNA, 281 bp, Homo sapiens
  misc_feature (1)...(281): n = A,T,C or G
ccaaaaccaggctttgattgaaccaggatgaatgcgggtgtcggaagtagaatatatatatacatataaaattgaaactggcgatggaatatgagaggagccctctggaaagaaaaggacagaccctgtgctttcatgaaagtgaaaatctggctgaaccagttccacaaggttactgtatacatagcctgagtttaaaaggctgtgcccacttcaanaatgtcattgttagactttgaaatttctaactgcctacctgcataaagaaaataaaatctttt

SEQ ID NO: 891 - DNA, 153 bp, Homo sapiens
ccagccctgaagttgccctcccagggaggaaccagctctgggagggaggggctgtcagacctccagggcctggctgggatctctggtcaggaatgtgtgaaagggtggtggggagagaagatggcagcacccccaggcatgggctgcgagcag

SEQ ID NO: 892 - DNA, 203 bp, Homo sapiens
aaagtagttttctttaggaactgtcagcatgttgttgttgaagtgtggagttgtaactctgcgtggactatggacagtcaacaatatgtacttaaaagttgcactattgcaaaacgggtgtattatccaggtactcgtacactatttttttgtactgctggtcctgtaccagaaacattttcttttattgttacttgcttttt

SEQ ID NO: 893 - DNA, 211 bp, Homo sapiens
cggccgaggtaaatttgccagcagggaagtaaaataattatgggaagagtgtcttaagcctaatattaaatcagttttgttaaggggaaaactcaatagttctgttacttaggctgttagatccaagttgatttttgtgtctacagctaaattttgtttacaattaggctattttttaatataggatttagaaaccaagggtatgtgtttt

SEQ ID NO: 894 - DNA, 344 bp, Homo sapiens
ctgattttatttccttctcaaaaaaagttatttacagaaggtatatatcaacaatctgacaggcagtgaacttgacatgattagctggcatgattttttcttttttttcccccaaacattgtttttgtggccttgaattttaagacaaatattctacacggcatattgcacaggatggatggcaaaaaaaagtttaaaaacaaaaacccttaacggaactgccttaaaaaggcagacgtcctagtgcctgtcatgttatattaaacatacatacacacaatctttttgcttattataatacagacttaaatgtacaaagatgttttccacttttttcaattttt

SEQ ID NO: 895 - DNA, 402 bp, Homo sapiens
  misc_feature (1)...(402): n = A,T,C or G
ctgaaggagactgtggaaaaatataaacgagctntggcagacactgagaacttacngcacagganccaganattggnggaggaggcaaanttatacngcattcaagccttctgcaaggacttgttggaggtggcagacgttctggagaaggcaacacagtgtgttccaaaagaagaaattaangacgataaccctcacctgaanancctctatgaggggctggtcatgactgaagtccagatccanaangtgttcacaangcatggcttgctcaaattgaaccctgtcggagccaagttcgacccttatgaacatgacgcctngtaccccaccggntgaagggaagaccangcacatggccctactacaaagtggggacaagctgcttggccactctagacc

SEQ ID NO: 896 - DNA, 425 bp, Homo sapiens
  misc_feature (1)...(425): n = A,T,C or G
ccaagaacgtgcaataaattggaagtttgccccggggcagcaagaatttatgctgccattgaagagcaggtaccagtgccccttttcagacagtttttgattcgctctagactttttttttttttaatagggagggaaaaaatttgataattttnttttttctncntgcncttaaaactaaaacacaggttgggataaatttatttgcttccttttnccntttttttccccaaancctgatgggaaaaatgtccagggcanggaaacccccttttttgnagggganaactcaaatgaaaattggggcttatttttacncttctctnttggggctnttttggggggctatctgttttaagggntcctttaaggcccctgggggccctggacctgcccgggnggcctnaaanggggaaattccaaca

SEQ ID NO: 897 - DNA, 172 bp, Homo sapiens
aaagcactcacataaatccatttcactcaaaaaggaaacataaagtgcttctagcagtacaagcacggttggcatggcctttccaaaggtcttccactagagtctagagaaatctaaatatagtcatccacaaactggatgtttttattttctgagccattagagattttca

SEQ ID NO: 898 - DNA, 516 bp, Homo sapiens
  misc_feature (1)...(516): n = A,T,C or G
ccggattggagggagcacagatacaggcaaacatatcaaggagaatgactattatactccaactggggagttccgtgtggaccgtgaaggttctccagtgctgctcaactgcctcatgtacaagatgtgttactatcgctttggacaggtttacacagaaccaagcgtcctccagctttgaccgtgtccgaaaatgctgagattgggaataaagacttttgagcttgatgtcctggaggaaacatataccacagaacattggctggtcangatatacaaggtnaaaggacctggataatcnaagcttgtcaaggacataaatggcacgttcaactntgattgcttccacttagccatnacatttaagacgttgaaaaatttttttttttttttttttaatatcantttgnaaaaacaaaactggatgggnttaaaattttntggaaattttnttttgggcaanatgggctgggccaaannaaaanatttttttaattttaaaaagggtncccaaaa

SEQ ID NO: 899 - DNA, 449 bp, Homo sapiens
  misc_feature (1)...(449): n = A,T,C or G
atgaagttcaatcccttcgttacctcggaccgcagtaaaaaccgcaaacgtcacttcaatgccccctcacacgtgcgcaggaagatcatgtcatccccgctctccaaggagctgcggcagaagtacaatgtccgctccatgcccatccgcaaggacgacgaaggtccaggtagttcgaaggacactacaaaggtcagcaaattgggcaagggtagtcccaggtggtaccagaaaagaaaatattgtcaatctaacatcgaancggggtggcanccgtgaagaaagggcccaaacgggcaccaaacttggtnccccgttggggccatttcanccccaaagccaaagggtggggnttantcacccaagggcttaaaaaacttgggaaccaaagggaattcgggnaaaaaaaaaaaatttntttggnaaaccgccnaaaagncccnaaattt

SEQ ID NO: 900 - DNA, 190 bp, Homo sapiens
aaatgaagtgattctaagatttggtttgggatcaataggaaagcatatgcagccaaccaagatgcaaatgttttgaaatgatatgaccaaaattttaagtaggaaagtcacccaaacacttctgctttcacttaagtgtctggccgcaatactgtaggaacaagcatgatctttgttactgtgatatttt

SEQ ID NO: 901 - DNA, 570 bp, Homo sapiens
  misc_feature (1)...(570): n = A,T,C or G
aaacatctcacatatacaaaataggtacaatttaatttttctgcttgcccaagaaacaaagcttctgtggaaccatggaagaagatgaaaatgagactggcaaagaacaaatgctgaatctgaagaagaggacaactttgggcaaataatctgcatacttttaattaggaataagatggaaaatatgaatgctaaatcaaattttttaaaaaatcaccacacgatacaactcaatacagggagtattctttctcaaaattctttcttacccccatcaacaattctttcaaagtattcttggaaaataccttatttaaatttaagcccccttttggtantttattgaaaccaaaaacccaaaaaccaaggggancccttcaaggtttcattcttcttggtcttaagggtccaagccanccctaaaccaattggtggggaatcaccaccttcatttgggggaaaaggtggnttttggaagggtaaattttacccttcggggccggcggaaaccaccnccttnagggggcggaaatttnccaaccaccccctttggcgggncggtttncttta

SEQ ID NO: 902 - DNA, 601 bp, Homo sapiens
  misc_feature (1)...(601): n = A,T,C or G
ccatggatgtgccccaatacagtacacattttttggttaaatttgttttcagatcatttcatggaatctttgaagtatctttgactctaactttgacttggtggtggaccttccttggtttttataacacctaagagatatcctttagaattacatgtattttagcataaggaaattggaaaaagtaaaacatctgggttttttcaccaagaccatatggtaaataaaatagtgaaaatggtggtatgaagttcaagtaagaacctggaccctcaaccaatggttttccattaaaatatgccanaagtncttttcttttggaattgggtaatttaccaataattggttaaaattggaatgcatttgccatttctaaggaatctaaaagaattggantacnagaaaggnnccaattttattatttggangaaaaatatgaaaaattaccggggcccnatacctggttttgatnaaatnaaattggattttttanccttgggccgcgnaaccacnccttaaggggggaaaattncaannacacctntngcgggccgtactaaaggggaancccaacttcnggaaccaaaacnttggggggaaa

SEQ ID NO: 903 - DNA, 532 bp, Homo sapiens
  misc_feature (1)...(532): n = A,T,C or G
ctgggtaccattccgggtcatccgcagaaattcctcatagatggcaactctgtctactctccgagccagtggcgagaagttacacagggagtccaccccggtgtggtgcctgttggggacagacctgaatgttgaaacttgacagtcagaaaaataactcttgatgctgctgtttcggaaagagttggttgaaccgcatcctcaatattcctttttgttcctctgggtaattgggtgggtgcctggcttggcttttgtcctgggaaatatgggtaagggttgggtgaatgggtgaaaattcaagggtaanaaatgcctggggtggcttggaaccttctttggttgggttgaatnaacttggatgaactncatttcttgcacatgggattgtccacccacttgggaaggtggaacccaaccaatggnatgaagnatttangggccttatntaaaaaagaattgcttcccccagggtnggggncaaaatggaaggaaaacaatggccttgacagtgaccacaccggaatccatt

SEQ ID NO: 904 - DNA, 404 bp, Homo sapiens
  misc_feature (1)...(404): n = A,T,C or G
ctattgtanatattgcaccctatgacattggtggtcctgatcaagaatttggtgtggacgttggccctgtttgctttttataaaccaaactctatctgaaatcccaacaaaaaaaatttaactccatatgtgttcctcttgttctaatcttgtcaaccagtgcaagtgaccgacaaaattccagttatttatttccaaaatgtttggaaaacaagtataatttgacaaagaaaaaatgatctttctcttttttttggctggttccaccaaaataccaatttcaaaatggcttttttggtttaattttttttacccaatttccaattttcaaaaatggtcttcaatgggtggctattaataaaaataaaacctttcaaccacttcttttattggaataaacctta

SEQ ID NO: 905 - DNA, 327 bp, Homo sapiens
  misc_feature (1)...(327): n = A,T,C or G
aagaaaggaaaataaactctttgtatgatatttattaggaggaaagaggactgaaaatgttcttgtgtagaaacagaaggacagcatttctgttagtcatttcctggaaaagtaatattttaaggggaaattatggaaacaatctaattgttcaattgctgtgctagtgggtagggtttattttctggnagtctctcctttgtgggctgtatgtttggtacacnccgtgccctctgcttgtcccaaagggaaggggttngtgtccaagtgtattggaagtagtggtggaacttaaagaacctggaaaaacggancttccccgggccg

SEQ ID NO: 906 - DNA, 508 bp, Homo sapiens
  misc_feature (1)...(508): n = A,T,C or G
gtcattgatgtccttcaccccgggaaggcgacagtgcctaagacagaaattcgggaaaaactagccaaaatgtacaagaccacaccggatgtcatctttgtatttggattcagaactcattttggtggtggcaagacaactggctttggcatgatttatgattccctggattatgcaaagaaaaatgaacccaaacatagacttgcaagacatggcctgtatgagaaagaaaaaaacctcaagaaagcaacgaaaggaaccccagaacagaatgaaagaaagtcagggggactgcaaaaggcaatgttggtgctggcaaaaaagaaatgaacctggaanattggatcaccagcccgaaaggaagtnaaaggtgcttcaatgatgttagcttgtggaccttccccgggcnggncgctcaaagggccaaattccaacacacttntggcgncggttacctaatggaatnccaaactcggtacccaaacnttggcgtaatcatngggccata

SEQ ID NO: 907 - DNA, 358 bp, Homo sapiens
  misc_feature (1)...(358): n = A,T,C or G
aaagttctttatagggttagggtgtgggaaaatgctatattaataaatctgtagtgttttgtgtttatatgttcagaaccagagtagactggattgaaagatggactgggtctaatttatcatgactgatagatctggttaagttgtgtagtaaagcattaggagggtcattcttgtcacaaaagtgccactaaaacagcctcaggagaataaatgacttgcttttctaaatctcaggtttgtctgggctctatcatatanacaggcttctgatagtttgcaactgtaagcagaaacctacatatagttaaaaatcctggtctttctttggtaaacagaattttacctccccggccgg

SEQ ID NO: 908 - DNA, 437 bp, Homo sapiens
  misc_feature (1)...(437): n = A,T,C or G
ccacggggactgttattcgcaagctggttttctagacctgttagctggaagcatggtgagcaccatttctggacgctcaggccgtgtcgggcttcagtcatctccaccacacaggtacagcagcgctttctggtagtcgcccttagtgtcttgctggataaacaaggtcataaataacaaaaaacaaagtaggtcccagactccggaccatgcancangaacaggggtgggaagggttgttgaatgggaaaaggtggaagggggctacaccatcacctaaaaacagtcaccagaaaaagaatgggctttcaaggaacacttgcccctttccttgaccttcgggccgcgaaccaccgcttaaagggccgaatttccaaccacaccttggcgggccngttaattagnggaattcccaacttcggtacccaaactttggg

SEQ ID NO: 909 - DNA, 720 bp, Homo sapiens
  misc_feature (1)...(720): n = A,T,C or G
gaaccaccacctccttacttacctgcctgaagaaattctgcctttgacaataaatcctataccagctttttgtctgtttatgttacagaatgctgcaattcagggctcttcaaacttgtttgatataaaatatgttgtcttttgtttaagcatttattttcaaacactaaggagctttttgacatctgttaaacgtctttttgtttttttgttaagtcttttacattttaataagtttttgaagacaatctaggttaagcaagaagcaaaagtgccattggttgcctttaattggggggngggaaagggaaaagaaggggtaccttgcccacataagtttncnttttnaactggccttttcttttatattaatccgttttggcattttggttaccttgctacccctgaagtacctttcaaggaaagaactggacttnaaatatttccggggggtgaagtaaagtaanttggggaattaanaancttgnaccttttcattctggcagaaggccaanaaaaaatattttggcaatttgngancttgactgggggnaaaaaaaangggtgcatggnttcctaanttgggataatgggttcccantttttgggaaaanaagaattaaataaaacttttttacctcggncccnaacacccctaagggngaaattccacacactttgggggcgttctaatggaaccaacttngtnccaacttgggg

SEQ ID NO: 910 - DNA, 459 bp, Homo sapiens
  misc_feature (1)...(459): n = A,T,C or G
aaaaaaaatcaattccctcatcactgaaaggacttgtacatttttaaacttccagtctcctaaggcacagtatttaatcagaatgccaatattaccaccctgctgtagcaggaataagaggcaaggtattagcactaagaaaaacagcaaaattcctgaacaaaatcatctgtcattttaaaaaagggataaaaaaacaggctaagtgggtgagcattttagttaagaaaggcccagtgttgttatgcaggactttcccgttaaaaaaaaaaaaaatcgaaatattttaactcaagtacgtttaattcccncagaggagcttaaaaaaaaaanaggggggtagtaaaatccanntactttttttcctngggcgnnaccacnctaanggcgaattccacacacttggcggccgttactaatggatccaactcggnnccaacttggggaannatgggcata

SEQ ID NO: 911 - DNA, 216 bp, Homo sapiens
ggcaggtaaactacctcaaaacactttcccatgagtgtgatccacattgttaggtgctgacctagacagagatgaactgaggtccttgttttgttttgttcataatacaaaggtgctaattaatagtatttcagatacttgaagaatgttgatggtgctagaagaatttgagaagaaatactcctgtattgagttgtatcgtgtggtgtatttttt

SEQ ID NO: 912 - DNA, 92 bp, Homo sapiens
atcattttcaataaaagatagggcttttgctcccttgttcttggagggaccattattacatctctgaactacctttgtatccaacatgtttt

SEQ ID NO: 913 - DNA, 109 bp, Homo sapiens; identical to SEQ ID NO: 765

SEQ ID NO: 914 - DNA, 189 bp, Homo sapiens
ttctagtagaggacgagtctgaaagttgactgaaaaagcaaaagctaatttaattggttggtaacttgtaccaaaatattttacttcaaaatctataaagcaggtacagttaaggaataagtagaactaaggcttctgcttccttgctgcttggggtgggagtagggaaatgttatgatttgatttaca

SEQ ID NO: 915 - DNA, 244 bp, Homo sapiens
  misc_feature (1)...(244): n = A,T,C or G
nnctgatcgtccttagccagtccaatctctacgaggaactggcatatgttcttgcgttggtcaccctgtagctgaattacttctccatattccggatgctcaattacaagtaccattgcaaggcaaactttttcttaaacgccttcactagtttctttttatcgtaatcatcagcgatcccttggacagtagtaaagggctttctgcccgttctctgtgaattcttacctcggcccgaacacgc

SEQ ID NO: 916 - DNA, 185 bp, Homo sapiens
ctatagggctcgagcggccgcccgggcaggtccaagcttgaggaagatgtgtggccttgcccccaattccatcagaccaaggctgcaagtggccctccattcgtgtgtgtatttaggggctggggagggggaaggggcaagaacttggaccttgtactacctcaagacctcgggccgcgaacacg

SEQ ID NO: 917 - DNA, 478 bp, Homo sapiens
  misc_feature (1)...(478): n = A,T,C or G
aaataagagtagaataggcctttattttgccgcaaatacttttgattttgcctaaagtttctaatagttcataacaagagtctttaaatgagaagtgacatagaatatttgaggataatggtccactccagcattcatgcttattccatttgagctattacacaagaaactcataccattcttgggttattacttggctgtgacgatttaattcataatatggctgctcaaaattagtgggcagaaacatcatacacccattctcctnaacccatttttcgggctggtactccatctgaaaacacacttactggtcatgtcccaacagtacatatctctttctatctatttccatatcttaanccttgcttaaaaacctcggncgcgaacacccttanggcgaaattcancacactgngcggccggtcttagnggatcccaactcggtaccaacntggcgtaatatgggcatactggt

SEQ ID NO: 918 - DNA, 478 bp, Homo sapiens
  misc_feature (1)...(478): n = A,T,C or G
ccagtcagggatgaggatggggcccgagggtctaaagaaggcactagagggacagggaccgctttgggtctcacccagtcaagttcacagtctgccctcttagtgtgaggaaatggggcttgaggtaccctgtttacttggcgctgggccaagccctccatctcctgagatggcctcatgtgggaagaaggcggaagggaaaggtcggctttgggaaatatcctatatgtcttgtcccgaaaggcttgtggcgggggcttccttgcttccaagggaatgcttggggaacgttgggcgggtncccttcttaaatgcttcaaaaaccttcnggnccggcgaanccaccgctttaaaggggccgaaatttccaaaccaccacttttggcggggccggttacctaantgggaattcccnanccttcnggtacccaangcntttgggcgtaaaattcattngggncaataaaccttgtttntt

SEQ ID NO: 919 - DNA, 357 bp, Homo sapiens
  misc_feature (1)...(357): n = A,T,C or G
aaaaaaattaaagtttccattttttttttanaataaagatttagtgcacaaatacagcccaaagccaacagaaaaattgctttgccctgtcatttccctaagaaagcactgaagttaactcaaaataggctgaaagaaaaaaagcaatcctctgagttctaggtttcacaaaaggaccacgtgttaaactatgtcatcgatttgatgtgcaagtatgcaataaatatgtacacatacattcctatctgcttttacatcattctaaagtattcatagtatatcaaagaagggatttagaaatgggaaaaggccataacagtgaaaaggaaaaaaaaagatncnatagtttttaaacca

SEQ ID NO: 920 - DNA, 581 bp, Homo sapiens
  misc_feature (1)...(581): n = A,T,C or G
aaactacctgttaatataagggatttgtagtatcagcttgttgagcaatgactttgaatctagttttcagtgatcagaagcagcagttatttgagtgtatgaatggaatgatgatcactgtgctataatgtactgaaaccaccatattacagaaatatttactacatattttccatctgtagtttctcagaagggctatggattaagtttgaactgtcaaatccttgcatacttctgtgacacccctgcccattttctgtctttaattaaccaaggnggtaggngtgactgtcacaactggtatgttttccagtaaactagaagtatgatatttgataattatatttgnatttcaccacctaaatgtaatggtgatttctcaagaatgaaatgaangcactacattgaaatatggtttgnataaatttgncatggtgaacaacattttaacatgggaaggtnccttactatatgaattttggcatggttcaaanaaacaataaataaaacctgccccggcggcgtccaaggcgaattccacnacttgcggcgntcaatggaccactcgnccacttgggaac

SEQ ID NO: 921 - DNA, 379 bp, Homo sapiens
  misc_feature (1)...(379): n = A,T,C or G
tgggcaataaagtttttggtgccctgaagggagctgtggatggaggcttgtctatccctcacagtaccaaacgattccctggttatgattctgaaagcaaggaatttaatgcagaagtacatcggaagcacatcatgggccagaatgttgcagattacatgcgctcttaatgggaagaagatgaaagatgcttacaagaaacagttctctcaatacataaagaacagcgtaactccagacatggaggagatgtataagaaagctcatgctgctatccanaaaattcaatctatnaaaagaagccccagaaagaagttaaaaagaagaagtggaacccgtccaaaatgtnccttgcttaaaaanaangatcnggtagctt

SEQ ID NO: 922 - DNA, 542 bp, Homo sapiens
  misc_feature (1)...(542): n = A,T,C or G
aaacatctcacatatacaaaataggtacaatttaatttttctgcttgcccaagaaacaaagcttctgtggaaccatggaagaagatgaaaatgagactgggcaaagaaacaaatgcttgaatctgnaagaaagaagggacaacttttgggcaaataatctgctacccttttaattgggaaataagaatgggaaaatatgaatgcttaatcaaattttttaaaaaatccccnccccgatccacttaatacnggaatatttcttctcaaattcttctaaccccatcaacattcttcaagtatttnaaatactattaattagcacctttgtattntnaaccaaacaaaacaagggccncagttcatntntntctaaggcagcacctaacaatgnggatcacactctgggaaagtggtttgaaggannttaaacctttggaantttgggntttcctgccccggcngccgttcnaaanggcgaattccacacactttgcggcgntcttatggatccactcggaccaacttgcgaatctgggatactg

SEQ ID NO: 923 - DNA, 483 bp, Homo sapiens
  misc_feature (1)...(483): n = A,T,C or G
aaatgcagggaaactcaatgtttttttaagttttgttttccctttaaagcctttttttaggccacattgacagtggtgggcggggagaagatagggaacactcatccctggcgtctatcccagtgtgtgtttaacattcacagcccaaaacccagatgtgtcttggaaaaccttgncaaggcattcctattcaccatcgtgtttgcaaaggttaaaacaaaaccaaaaanccccaaaattnaaaaccaaaaaaaccaaaaaccccagaaaaaaaaaaaantnancctttgnttttnntttcaaccccntcaaaaggggaacaacttcnnttgcctnggggttcccaaggaacntcttggttaacctggcccnnaaaaactgggttttgtcccaccattncaaaaantgggggggggtttnaangcttggggggntngctttgtnggaacctcggcnngaacccncctaaggggngaattccac

SEQ ID NO: 924 - DNA, 379 bp, Homo sapiens
  misc_feature (1)...(379): n = A,T,C or G
cctgagggagatcagttggcaacccaagtagaaggggcccatgctgctcttctggaacaagggtctgagcaggtgctgaaggaccccctcggtggagtttgaaatgtagctgagcccttgcccatatctggtgaaatactggaagaattggaagaatgggtgaaatttgaagtgtgaaggggtctttcaagggtgggtcccccatgggctgnttgtggctttttgacanaagaaggcaagaaatgntggtngnttgctttggaagttgnaagaagggttatnttgaccaggtcatttgnaaccngtaaaggaaaagcttncnttntccaaaaagnaggggccaaaacttncccggcggcccttcgaaaaggcgaattcc

SEQ ID NO: 925 - DNA, 511 bp, Homo sapiens
  misc_feature (1)...(511): n = A,T,C or G
gtggccgcaaagaagacgaaaaagtcgctggagtcgatcaactctaggctccaactcgttatgaaaagtgggaagtacgtcctggggtacaagcagactctgaagatgatcagacaaggcaaagcgaaaattggtcattctcgctacaactgcccagcttttaggaaatctgaaatagagtactatgctatgttggcttaaactggtgtccatcctacagtggcaattatattgaactgggcacagcatgcggaaaatactacaaaatgngcacactggctatcattgatncangngactctgacatcattagaagcatgccanaacanactggtgaaaagtaaaccttttcacctaccaaatttccctgcaaaccttaaacctgcaaaattttnctttatnaaatttgcttgtttacctgccnggcnggcgtcgaaaggcnattncacacacttngcggcgtacttatggatccagctcgnnccaacttggcgnaatatgggcatactgg

SEQ ID NO: 926 - DNA, 361 bp, Homo sapiens
  misc_feature (1)...(361): n = A,T,C or G
ctgtggggctcggccccaaccccggccccaccccggcctggcgctgtctgagaagaggggatctgagggaagatccagggatcaggcaggatagggatggggcaggacatgaagcttgggggatgcagaaggttaggtgggaagaaggctacccggaaggaaagaaatgaaggcttggtagggggaggggaagaaaagaagaaccaaagaagaagaagaaggaagcaatttggggggccagaccttgcccgggccggccgcttcnaaaaggccaattccancacacttggccggccgttacttatngaatccaacttngtacccancttggcnaatcattgncatagctgtttncttggga

SEQ ID NO: 927 - DNA, 486 bp, Homo sapiens
  misc_feature (1)...(486): n = A,T,C or G
aaactacctcaaaacactttcccatgagtgtgatccacattgttaggtgctgacctagacagagatgaactgaggtccttgttttgttttgttcataatacaaaggtgctaattaatagtatttcagatacttgaagaatgttgatggtgctagaaanaatttgagaaagaaaatactcctggattgagttgtatcgtggggggtatttttttaaaaaaatttgaattaacattcatatttttccattcttatttccaaattaaaagtattgccagaatattttggccaaaagttggtcctcttctttanaatcaagcanttggtctttgncaanctcattttcatcttctttcatnggtccacanaanctttgtttcttgggcaaagcagaaaaattaaattgnacctnttttggatatttganaaggttaaatnaattgggaaaaaaatgaaataaagcatggttgggttttccaaggaaaaaa

SEQ ID NO: 928 - DNA, 441 bp, Homo sapiens
  misc_feature (1)...(441): n = A,T,C or G
cccagcttctcgagaggctgaggcaggagaatggtgtgaacctgggaggcggaacttgcagtgagccaagatcgcgccctgcactccagcctgggtgacaaagcaagactccgtctcaaaagaaaaaaaagaaaatatttgtaattaaatgaaaatgaaaacacagtatatcaaaatttgtggggatccagcttaatccagtggttttaaaaggaaacttcagcttttaaaagaaaaggtcttaaaatcaagtggaaccttaccatttcttgncctttattaagaaaaggaagaaaatcttaaantttggaaagaagaaaatttatttaaaggaagccttaaaaggttaaattggaagaattggaaaaaanccaaggggccccggggttgnaaagggtggggcnttcaaccttnccttggtnaaattncccccaaccaacc

SEQ ID NO: 929 - DNA, 480 bp, Homo sapiens
  misc_feature (1)...(480): n = A,T,C or G
cagggtttgggtacnattccgggtcatccgcagaaattcctcatagatggcaactcttgtctactctccgagccagtggcgagaagttacacagggagtccaccccggtgtggtgcctgttggggacagacctgaatgttgaaacttgacagtcagaaaaataactctngatgctgctgnttnggaaganttggttgagcccatcctcaatattccttttgttcctctggtaattggtggtgcctggctgggctttgtcctgggaatatggtaggttggtgatggngaaattcatgtaaaantgctgggtgctggaactgcttgttggttgataaactgatgactccatttctgcacatggatgccnccaactggtnggnggagcccaccaatgacctnggccgggacccnctaagggcgaattncanacactgggggccgtctannggatccaactnggnncaacttggngaatatggg

SEQ ID NO: 930 - DNA, 194 bp, Homo sapiens
aaaagggggtgggctagcttgaaacaagcttacagtggcgtgaagcatagtggcgtgaaagcaaggatacagaggcagcacaaaggcaattaattcatcaaattgtggcaggtgcataattcaggattacatactgtgtcggaattgatgggttcttggtctcactgacttcaagaaagaagcacctgcccggg

SEQ ID NO: 931 - DNA, 218 bp, Homo sapiens
  misc_feature (1)...(218): n = A,T,C or G
cgaggtccacagctccctcttgcgctgtatgacatcgtcctcaaaccactcggcctgattggaaacccagaacatagccacagggaaagtgagggaaaattatcatccgaatatctccagtttaccccatctacctgcccggcggccgtcgaaggcaattcacacacttgcggcgtctatgatcgactcgacaacttgctatatgctactnttctgga

SEQ ID NO: 932 - DNA, 107 bp, Homo sapiens
aaaaattagtctgtactcaaatgcatagttaaaaaatgaagcgagatggcagtttgtgcagtaatatctgcccttcgaagttcatgcaaccaactaatgcaattttt

SEQ ID NO: 933 - DNA, 340 bp, Homo sapiens
  misc_feature (1)...(340): n = A,T,C or G
ctgcagcccatcctcccggctccctcctagtctgtcctgcgtcctctgtccccgggtttcagagacaacttcccaaagcacaaagcagtttttccccctaggggtgggaggaagcaaaagactctgtacctattttgtatgtgtataataatttgagatgttttaattattttgattgctggaataaagcatgtggaaatgacccgaaaaaaaaaaccttccccgggcgggccgntcaaaangggcaaattccaacacncttggcggccggttactaangggatcccaactcggganccaantttggggnaaaanattgggcanaacttgtttcccctgg

SEQ ID NO: 934 - DNA, 148 bp, Homo sapiens
tatttgcccaaagttgtcctcttcttcagattcagcatttgttctttgccagtctcattttcatcttcttccatggttccacagaagctttgtttcttgggcaagcagaaaaattaaattgtacctattttgtatatgtgagatgttt

SEQ ID NO: 935 - DNA, 646 bp, Homo sapiens
  misc_feature (1)...(646): n = A,T,C or G
aaaaggcttcttgtgattaaaagagaaaattctgaaaaccacagcaacatatctatgctgtttccaagcatacaaagagaattagaacatctgagacaactatggctccaaacaatcagaagaagggttagttttcttttctcctattgataatgtcaaaatgatgtgtcatctattgagccatactatggagtagcaggctactagttagatgccttccccagttaacagcacatatccaaaggacagctagccaagtgggaaggtggtaggtaaatgctcatctgggctaggcaaccaccacagcaagcaggtcccctctcagcctggcttggcaatgagctgcttctgagaagccacagctatctgtggttgagagctcactcccttgaggcattgcaganaacaagagacatgggctgtggggcagcttttcaataaaactgagaggcacatcaacatggcacttgtatgtgtccncttaaggattatgataaacatgccaatttccaaaaggtaaattattaaannaanatttgggaccttgccccgggcgggcccgttaagggcgaaattccancacccttgngggcngtncttantggnatnccaacntcggnnccaaacnttggnggaancatgggca

SEQ ID NO: 936 - DNA, 152 bp, Homo sapiens
  misc_feature (1)...(152): n = A,T,C or G
ctgattttatttccttctcaaaaaagntatttacagaaggtatatatcaacaatctgacangcagtgaacttgacatgattagctggcatgattnttnctttttttcccccaaacattgtttttgtggccttgaattttaanacaaatattc

SEQ ID NO: 937 - DNA, 393 bp, Homo sapiens
aaaaaaactttatataacaatctgcataaatctcataactgggagcactatacccaggaggttttcttaccagaaaagttcatatcctctttgcaattttcttttaattctacaggaaagaggaaattatggttgggatggatgaaaaaggaccacatactggtccaggaggtaaagtatcttattttgccaactgtttgggcatctgtgtgcccattttttatttggaagatctaaattaattttgttgctcaaaaatcaacctttacaatcttacacatttacctctttcaagatagtgcctgagcctagagggaagatgcttatatagttttagcagtggagcattagcattgaaaatagatcgggcccagtgggattctgaatagtttt

SEQ ID NO: 938 - DNA, 439 bp, Homo sapiens
aaaacttggctgggattctcaacatatcttatcaataatacatgtatacaatccaaaaggtgcagtggcttcttcattctgttccagaatggatcccgtgatttgaacaactgatcataaacttctagtagtctaggtaatggtactccaatttcattcattgtctgtattacgaagcccacatcccagttcaaagtacaaacctgctgttctaaaaactgtacaataaaatctaaaggaaagaagcgtggtgtgccagcataaattttgccaaggagaacaatcttgagactaagagcatgcattctatccgaggagctcaatgtcacactgtcactcaattctttctctatgatatcttgccaaagtgtctgcaccaatatagggtctgaataacccggcacaatgaattattgcaagtttgcactcttgcaagttt

SEQ ID NO: 939 - DNA, 568 bp, Homo sapiens
  misc_feature (1)...(568): n = A,T,C or G
ctggaacagtatatgaagacctgaggtataagctctcgctagagttccccagtggctacccttacaatgcgcccacagtgaagttcctcacgccctgctatcaccccaacgtggacacccagggtaacatatgcctggacatcctgaaggaaaagtggtctgccctgtatgatgtcaggaccattctgctctacatccagagccttctaggagaacccaacattgatagtcccttgaacacacatgctgccgagctctggaaaaaccccacagcttttaagaagtacctgcaagaaacctactcaaagcaggtcaccagccaggagccctgacccaggctgccagcctgtccttgtgtcgtctttttaatttttcttagatggctgtcctttttgtgatttctggatanggactctttatcttgagctgggggatttttggtttggttttgctttttaccttgcccnggcggccgttcnaaangggcgaaattccancacacttgcgggcggtnactantggaatcccaacttcggnncccaaacttgggcgtaannattgggcataa

SEQ ID NO: 940 - DNA, 371 bp, Homo sapiens
  misc_feature (1)...(371): n = A,T,C or G
gcgaggagatcgccattatccccagcaaaaagctccgcaacaagatagcaggttatgtcacgcatctgatgaagcgaattcagagaggcccagtaagaggtatctccatcaagctgcaggaggaggagagagaaaggagagacaattatgttcctgaggtctcagccttggatcaggagattattgaagtagatcctgacactaaggaaatgctgaagcttttggacttcggcagtctgtccaaccttcaggtcactcagcctacagttgggatgaatttcaaaacgcctcggggacctgtttgaattttttctgtagtgctgtattattttcaataaatctgggacaacagcaaaaaanaaaaaaaaaaa

SEQ ID NO: 941 - DNA, 174 bp, Homo sapiens
aatggcggagctgggcgaagccgatgaagcggagttgcagcgcctggtggccgccgagcagcagaaggcgcagtttactgcacaggtgcatcacttcatggagttatgttgggataaatgtgtggagaagccagggaatcgcctagactctcgcactgaaaattgtctctccag

SEQ ID NO: 942 - DNA, 256 bp, Homo sapiens
ctttgtggacattggcccagtctgtttcaaataaatgaactcaatctaaattaaaaaagagagaaatttgaaaaaactttctctttgccatttcttcttcttcttttttaactgaaagctgaatccttccatttcttctgcacatctacttgcttaaattgtgggcaaaagagaaaaagaaggattgatcagagcattgtgcaatacagtttcattaactccttcccccgctcccccaaaaatttgaatttttttt

SEQ ID NO: 943 - DNA, 628 bp, Homo sapiens
  misc_feature (1)...(628): n = A,T,C or G
ctgtgtgtgcatagtaaagcaggagatccccgtcagtttatgcctcttttgcagttgcaaactgtggctggtgagtggcagtctaatactacagttaggggagatgccattcactctctgcaagaggagtattgaaaactggtggactgtcagctttatttagctcacctagtgttttcaagaaaattgagccaccgtctaagaaatcaagaggtttcacattaaaattagaatttctggcctctctcgatcggtcagaatgtgtggcaattctgatctgcattttcagaagaggacaatcaattgaaactaagtaggggtttcttcttttggcaagacttgtactctctcacctggcctgtttcatttatttgtattatctgcctggtccctgaggcgtctgggtctctcctctcccttgcaggtttgggtttgaagctgangaactacaaagtgatgatttcttttttatctttatgcctgcaattttacctagctccactaggnggatagnaaaattatcttatgttccctcaaaaaaaactcggncgnnaccccctaagggcgaatccaccccttgcggccgtatatggatccanctcggaccaacttgggaatatggcataac

SEQ ID NO: 944 - DNA, 516 bp, Homo sapiens
  misc_feature (1)...(516): n = A,T,C or G
ccataatggtttgttgggggtgagggaaaaaacccacagggaccagaatgttttgttgttcttttgttttcttttttgtaccaaagtcaactgcacgtgttttatatttttaagagatcgtaggcaattagagatcgaagcctcctatctccacatctctgaagaagttgaggggtgggggagagaatgacttctgccttcatctgcagtaacggggggacctatactgacctcttccccagccatttagaaacaagttctagggtgggttggaaaatctccaagagccctgacctcatcttccacctcagcaaccatgacctgaaacctcagcgtgaatttgggggatttttcagtggaacccttgcccccaaatgtcgaccagcccccaaatgtcgaagaattttcttcttgccaattttgttggttacctgcccgggcggncgctcgaagggcgaattccagcacacttngcggccgtctagtggatccanctcgtnccaacttggcgtatct

SEQ ID NO: 945 - DNA, 345 bp, Homo sapiens
ctgctacttgaaccctaatccctgggtggatgtggtctcttgtaacttaagagcaaatgtttgtgatgacatgcacgggtgggcagaggttgaaaagaacaggggtctacggaggagccaggccagccacgtgagacccttctttctaagttggcttcttgtccattcctggggattggggaaagaacgacagaacttaccttccatcttccttctcacaagcagtgttttgggtgtccccaaaaggaggaggcaagaactcaggtgtggggtggaggggatggggctggctaaagaagtgagtatgaccccagaggccagagagggcagggagagaatgcctgg

SEQ ID NO: 946 - DNA, 553 bp, Homo sapiens
  misc_feature (1)...(553): n = A,T,C or G
tggaaatgtaaagaaggccctgaagctgatggggtcaaatgaaggtgaattcaaggctgaaggaaatagcaaattcacctacacagttctggaggatggttgcacgaaacacactggggaatggagcaaaacagtctttgaatatcgaacacgcaaggctgtgagactacctattgtagatattgcaccctatgacattggtggtcctgatcaagaatttggtgtggacgttggccctgtttgctttttataaaccaaactctatctgaaatcccaacaaaaaaaatttaactccatatgtgttcctcttgttctaatcttgtcaaccagtgcaagtgaccgacaaaattccagttatttatttccaaaatgtttggaaacagtataatttgacaaagaaaaatgatacttctctttttttgctgttccccaaatacaattcaaatgctttttgttttatttttttacccaattccaatttcaaaaagtctcaatggngctataataaataacttcaacctctttatncaaaaaaaaaaaaaaaaaaaaaacc

SEQ ID NO: 947 - DNA, 635 bp, Homo sapiens
  misc_feature (1)...(635): n = A,T,C or G
ctgggtaccattccgggtcatccgcagaaattcctcatagatggcaactctgtctactctccgagccagtggcgagaagttacacagggagtccaccccggtgtggtgcctgttggggacagacctgaatgttgaaacttgacagtcagaaaaataactcttgatgctgctgtttcggaagagttggttgagcgcatcctcaatattccttttgttcctctggtaattggtggtgcctggctgggctttgtcctgggaatatggtaggttggtgatggtgaaattcaggtagaagtgctgggtgctggagctgcttgttggttgataaactgatgactccatttctgtcacatggatgtccaccaactggtaggtggagcccaccaatggaatgaggcattcagggtcttatctagaaagacttgctccaccaggctggggtccaaattggaggagaacaatgccttgacagtgaccaacaccggagtccatcntcaatttggtgaccaggcanaaaccggaatgnggcattgtantttgactgnctttgtanantgggggngaacaccttcggccgcgaaccacccttanggggaaatttccanccccttggggggcggttnctanngggatcc

SEQ ID NO: 948 - DNA, 271 bp, Homo sapiens
gaagattcccgagagtaaatcatctttccaatccagaggaacaagcatgtctctctgccaagatccatctaaactggagtgatgttagcagacccagcttagagttcttctttctttcttaagccctttgctctggaggaagttctccagcttcagctcaactcacagcttctccaagcatcaccctgggagtttcctgagggttttctcataaatgagggctgcacattgcctgttctgcttcgaagtattcaataccgctcagtatttt

SEQ ID NO: 949 - DNA, 158 bp, Homo sapiens
ctgtggaggagggtttcagaggagagaggtcggagagcagaggcctgagaagccagaggcaggtggagagagggtggaaagtgagcagcgggctgggctggagccgcacacgctctcctcccatgttaaatagcacctttagaaaaattcacaagtcc

SEQ ID NO: 950 - DNA, 89 bp, Homo sapiens
ctgaacagagaaaggaattaaaacgctttaattaaaaaatcacgagtggatgataaagtgtgtagaaactgaaaatttacaaactattt

SEQ ID NO: 951 - DNA, 146 bp, Homo sapiens
ctgggggccctcaccctgcatcgtcttgcgtctcttggcaggcacaccactgaggtaggcatcactcagagggggctgcggtttcaccttccgctggctctgaatgtcctgctggataatagggacccattctggggggactgcag

SEQ ID NO: 952 - DNA, 223 bp, Homo sapiens
ctgatcgtccttagccagtccaatctctacgaggaactggcatatgttcttgcgttggtcaccctgtagctgaattacttctccatattccggatgctcaattacagtaccattgcaggcaaactttttcttaaacgccttcactagtttctttttatcgtaatcatcagcgatcccttggacagtagtaagggtcttcctgccgtttctctgttgaattctt

SEQ ID NO: 953 - DNA, 451 bp, Homo sapiens
  misc_feature (1)...(451): n = A,T,C or G
ctgaacagccaaatgcatggtgcagttgacagcaggtgggaaatggtatgagctgaggggggccgtgcccaggggcccacagggaaccctgcttgcactttgtaacatgtttacttttcagggcatcttagcttctattatagccacatccctttgaaacaagataactgagaatttaaaaataagaaaatacatgagaccataacagccaacaggtggcaggaccaggactatagcccaggtcctctgatacccagagcattacgtgagccaggtaatgagggactggaaccagggagaccgagcgctttctggaaaagaggagtttctaggtagagtttgaaggaggtgagggatgtgaattgcctgcagagagaaccttgttttgttggaaggtttggtgtgtggagatgcanaagtaaaagtgtgagcagtgaattcagcgagaggc

SEQ ID NO: 954 - DNA, 322 bp, Homo sapiens
aaattgcattcttttcaaatttataagtctaagaaaacaaaaccaaataaaagaagccatttcaaggagtgcgtatttgccatttgactgcaacaaaaggcccggccacactgagctaaaaggtaatactctcgaccccattcttctaacacagaaaactttctcaggtaaactgtggggttatgagaatccccctaactagaaatgttgatgggaactgagcattgcttgctttcatcaggtgttcttgttgccaaagacatgaacgatactgaggaaaacgacaagagtgagcattcccgccagtaaatcttcaagggtg

SEQ ID NO: 955 - DNA, 226 bp, Homo sapiens
ccactgcctctgcagtatcaaagagaattagtctttccacaaaacaaattttaacagccaatctctggatttctgtagtggctttagtcaggcatatttatcatcatattagcagtgttcagttcctgcccaacatctttatttaatcccaattcagtgcttatggatgctcagctcatgtttaatgttgcaagccccatcttagcccatcttaattcaaacagaa

SEQ ID NO: 956 - DNA, 232 bp, Homo sapiens
gatgatgtggctttgaagaactttgccaaatactttcttcaccaatctcatgaggagagggaacatgctgagaaactgatgaagctgcagaaccaacgaggtggccgaatcttccttcaggatatcaagaaactagactgtgatgactgggagagcgggctgaatgcaatggagtgtgcattacatttggaaaaaaatgtgaatcagtcactactggaactgcacaaactgg

SEQ ID NO: 957 - DNA, 247 bp, Homo sapiens
ggcccaggccgccacctgcaaccacactgtgatggccctaatggcttccctggatgcagagaaggcccaaggacaaaagaaagtggaggagcttgagggagagatcactacattaaaccataagcttcaggacgcgtctgcagaggtggagcgactgagaagagaaaaccaggtcttaagcgtgagaatcgcggacaagaagtactaccccagctcccaggactccagctccgctgcggcgccccag

SEQ ID NO: 958 - DNA, 400 bp, Homo sapiens
aaaacattgtcaggtgaggcaaatgcacaagtaatagaaagcaaagggcaaggttcactgaatcacagcagtcagaagaaagtgctttagggaaccaagagattgtttccagcctgaagaggcatgggtggcaaatcagaaaaggggattgagattaaaatagaagacttcagtctggattgttgatgacactcagtatggactatatttgtctctccttttcctttctccccatctttgggcttaatttacatgtagtgcccaggactgttcaatgcgctttttctatacttgcttgcatttttgctttaatgtcttctacagaactaggtccttttggtgttttaggagttttttcctgtttcttgaaggattcttgtcctttacctcgccgcgacca

SEQ ID NO: 959 - DNA, 632 bp, Homo sapiens
  misc_feature (1)...(632): n = A,T,C or G
gagcgccgctccggctgcaccgcgctcgctccgagtttcaggctcgtgctaagctagcgccgtcgtcgtctcccttcagtcgccatcatgattatctaccgggacctcatcagccacgatgagatgttctccgacatctacaagatccgggagatcgcggacgggttgtgcctggaggtggaggggaagatggtcagtaggacagaaggtaacattgatgactcgctcattggtggaaatgcctccgctgaaggccccgagggcgaaggtaccgaaagcacagtaatcactggtgtcgatattgtcatgaaccatcacctgcaggaaacaagtttcacaaaagaagcctacaagaagtacatcaaagattacatgaaatcaatcaaagggaaacttgaagaacagagaccagaaagagtaaaacctttttatgacaggggctgcagaacaaatcaagcacatccttgctaatttcaaaaactaccagttctttatttggtgaaaaacatgaatccagatgggnttggttgctctattggactaccctgangatggngtgaccccatatattaatttctttanggatggtttaaaaatgggaaaatgttancaaatgnggnaattattttggg

SEQ ID NO: 960 - DNA, 206 bp, Homo sapiens
cgctcagaccctgtcttccctaccactgggtacagatggatgcggcgaagtcaagagaaccaatggcagaaggaggagtgtagagcttacatgcagatgctgaggaagttgttcacagcaatccgtgccctgttcctggctgtctgtgtcttgaaggtcattgtgtccttggtttccttgggagtaggtcttcgaaacttgtgtgg

SEQ ID NO: 961 - DNA, 204 bp, Homo sapiens
ctgccaaggagaccctgttatgctgtggggactggctggggcatggcaggcggctctggcttcccacccttctgttctgagatgggggtggtgggcagtatctcatctttgggttccacaatgctcacgtggtcaggcaggggcttcttagggccaatcttaccagttgggtcccagggcagcatgatcttcaccttgatgccc

SEQ ID NO: 962 - DNA, 190 bp, Homo sapiens; identical to SEQ ID NO: 636

SEQ ID NO: 963 - DNA, 495 bp, Homo sapiens
  misc_feature (1)...(495): n = A,T,C or G
aaagttaactggataactaaagaaatgatgcagacattttaatccagtgctataggtaggctcacagaattagacccaaaggatttgtaaaaacaaaaatggaaacagtatagctacaatgtcaaagtcaggaaagaagaaaatttacttccgtattcaaggattacagagctacaaatgcagtctgtgtgtttttgtttgtaatgagatggataagtacatcagactagatacaacatgcagaatgttttcctgaacttatccggaaattccaaagaaaacatcatgaaacagcttacaaaaaaaaaaatatatgccctagttattcaccctgcttcaacactgtcaacgtaaaggcagaaataaagcaagctatcaatacctcanaactactgatataagacatcaaatttctaaatcagtgtattaaaaaagtgaacacttcctctttntttttnttctacattaactanaacatgttacctcggccgcacc

SEQ ID NO: 964 - DNA, 472 bp, Homo sapiens
  misc_feature (1)...(472): n = A,T,C or G
ctgggtgacaaagtgctcacagttcctgctcacaatactgtacttcatcttctgaccaaccatctccttcgcagaactgatgatcacctccacgggccgtggttggtactcatggtccaagctgttgttgacccgatagcaacagcctcccaccacatcttccaggcgctcccgtttcacctctgcactgttgctcaggactgagaagacactggaggagccagccccggggtactcacttggaggagccagatggatcacgtagccatctcctatatacagggcccagtgctcatagccaaggcggaaaatctcaatcaggtctccaggtttgggctcttggtgtgggcgaaanccatctcnaaacccaaaccttgnccgggcgggcggttcnaaaagggcgaaattncancacacttggcgggccgntacttaattgggatcccnagcnttnggtaccaacctttgggcg

SEQ ID NO: 965 - DNA, 622 bp, Homo sapiens
  misc_feature (1)...(622): n = A,T,C or G
ctgggtaccattccgggtcatccgcagaaattcctcatagatggcaactctgtctactctccgagccagtggcgagaagttacacagggagtccaccccggtgtggtgcctgttggggacagacctgaatgttgaaacttgacagtcagaaaaataactcttgatgctgctgtttcggaagagttggttgagcgcatcctcaatattccttttgttcctctggtaattggtggtgcctggctgggctttgtcctgggaatatggtaggttggtgatggtgaaattcaggtagaagtgctgggtgctggagctgcttgttggttgataaactgatgactccatttctgtcacatggatgtccaccaactggtaggtggagcccagccaatggaatgaggcattcagggtcttatctagaaagacttgctccaccangcttggggtccaaattggaggagaacaatgncttgacaagtgaccaacacngagtccatcgtcaagttggtgaccangcagaagcggaatgggnatggagntgactgccttttagaatgngggaccttgcctggatgncctcacagggngatgnctttgaagatngggggntgaatactgaggtcca

SEQ ID NO: 966 - DNA, 255 bp, Homo sapiens
  misc_feature (1)...(255): n = A,T,C or G
tggtcacnctaannaccacaggtgttncacctgtgananagggtcatatgcaantntgctgatgaatantgancaattattgaaccnntaacattttattgcnnnctgggtggaatctcacaattagagattatttccccttttcttggatatggcattgctggtggtgcancnatggagagggtttcannncccactggntcaaaagtgagggggcaaaangaacctnaatgtgtgtgtgtgtgngtgngtctg

SEQ ID NO: 967 - DNA, 337 bp, Homo sapiens
ctgagctgaggaaggtgaccactgagaacccattcaacctgctgagcaggctgggcagaaaggagcaggacttgggacagacgactgaagatgcagagaccccatgggccccacccctgggccttcctcccatgtggctgcaggccatcctctctgatcactgctgggttgcttcctggttaaagggccagaaggtgaaggagatgggcttttcaggcatcagaatgaggttgaatgtggtgcccacatcgctgaggtgttggatttcaactctgaagttctccagcatattgatgaggaagatggtcatctctagctcagcgatccgccgtcccag

SEQ ID NO: 968 - DNA, 285 bp, Homo sapiens
  misc_feature (1)...(285): n = A,T,C or G
ctgaaagattnactgcctgaacatctgaaattgacaactctgggacatctggagaaagctgtagtcttggaattaactttgaaacacttaaaagctttaaccgccttaaccgagcaacagcatcagaagataattgctttacagaatggggagcgatctctgaaatcgcccattcagtccgacttggatgcgttccactcgggatttcaaacatgcgccaaagaagtcttgcaatacctctcccggtttgagagctggacacccagggagccgcggtgtgtccag

SEQ ID NO: 969 - DNA, 520 bp, Homo sapiens
  misc_feature (1)...(520): n = A,T,C or G
atggcttttaaggataccggaaaaacacccgtggagccggaggtggcaattcaccgaattcgaatcaccctaacaagccgcaacgtaaaatccttggaaaaggtgtgtgctgacttgataagaggcgcaaaagaaaagaatctcaaagtgaaaggaccagttcgaatgcctaccaagactttgagaatcactacaagaaaaactccttgtggtgaaggttctaagacgtgggatcgtttccagatgagaattcacaagcgactcattgacttgcacagtccttctgagattgttaagcagattacttccatcagtattgagctaggagttgaggtggaagtcaccattgcagatgcttaagtcaactattttaataaattgatgaccagttgttaaaaaaaaaaaaaaaaaaaacttnccnggggggccgttcaaaggggnaatttccccccacttgggggccntttttagggaatccganctgggnccaaccttgggnaaataatggcnanactgnttc

SEQ ID NO: 970 - DNA, 162 bp, Homo sapiens
aaatttttcattttattcaaagttggtacagaattgctaacatttccataaaataattactatacttcagttacaggacaaaataccacagaaaggaatgtactttgcaagaaatgtagttcatcttaagtttccaaatacttttgaaggctaatgcagcag

SEQ ID NO: 971 - DNA, 254 bp, Homo sapiens
aaaaagtattctagcacaagatttttctgtaaactagattatgttgtaaacttttttctaaatcttgtaggagtgtcggttgttaagaactagagcttattcctattccaaatctatcttgcgctcctgaaaagctgcagaaaggcacttgaaagctgtttctttaagatatggatttcttttttattcttgctggtaatatattgctgcactgagtgtgtgcaatttttattcaaggtcatcgtgatgctgag

SEQ ID NO: 972 - DNA, 297 bp, Homo sapiens
  misc_feature (1)...(297): n = A,T,C or G
tggcagcctcagctctgtgcccctcaccctgctccctctcgccccttctctcccaccccttccttctgagccgggccctggggattggggagccctcttgttcctgatgagggtcagggcagatgaaagtgttgaaaagaggtcaaatggaaacaaaggctcttacccgctgtatttcagacaggactgaggcacttagccgaggagccactgggttattagattaatttcaaaagagcttttacaagttgcttaattccttttttttttttttttttttaaaaaccccnnaacccc

SEQ ID NO: 973 - DNA, 270 bp, Homo sapiens
agctgatccagaaggagctcaccattggctcgaagctgcaggatgctgaaattgcaaggctgatggaagacttggaccggaacaaggaccaggaggtgaacttccaggagtatgtcaccttcctgggggccttggctttgatctacaatgaagccctcaagggctgaaaataaatagggaagatggagacaccctctgggggtcctctctgagtcaaatccagtggtgggtaattgtacaataaattttttttggtcaaattcaaaaaaa

SEQ ID NO: 974 - DNA, 712 bp, Homo sapiens
  misc_feature (1)...(712): n = A,T,C or G
aaactcacataggtaggtatctttatagttgtagactatggaatgtcagtgttcagccaaacagtatgatggaacagtgaaagtcaattcagtgatggcaacactgaaggaacagttaccctgctttgcctcgaaaatgtcatcaatttgtaattttagtattaactctgtaaaagtgtctgtaggtacgttttatattatataaggacagaccaaaaatcaacctatcaaagcttcaaaaactttgggaaagggtgggattaagtacaagcacatttggcttacagtaaatgaactgatttttattaactgcttttgcccatataaaatgctgatatttactggaaacctagccagcttcacgattatgactaaagtaccanattataatgccagaatataatgtgcaggcaatcgtgggatgtctctgacaaagtgtgtctcaaaaaataatatacttttacattaaagaaaatttaatggttctctggagntggggctcttggctttcagagtttggntaatcaanngttgattctagatgataaccttaaatggaccactcntgaatgagacttaattttggctttnaaaattactggcttaaatcagtttattaaatctgaatttaccttgcccgggggcccttcnaaggggaattcccccncttgcggccgtnnaatggatnccactcggccnaacttgggggtnn

SEQ ID NO: 975 - DNA, 266 bp, Homo sapiens
aaatttgaccaaaaaaaatttattgtacaattacccaccactggatttgactcagagaggacccccagagggtgtctccatcttccctatttattttcagcccttgagggcttcattgtagatcaaagccaaggcccccaggaaggtgacatactcctggaagttcacctcctggtccttgttccggtccaagtcttccatcagccttgcaatttcagcatcctgcagcttcgagccaatggtgagctccttctggatcagctcct

SEQ ID NO: 976 - DNA, 627 bp, Homo sapiens
  misc_feature (1)...(627): n = A,T,C or G
aaaattaaaattaaatcccctccctccagcacacacaaaaaaaacacacaacattagaggaatgccaaaaatattctctattacaacttttttaaattctttaattaaggcattggtcccaacggtgcacatagattaagggattttgcttccttctgaactagatcatttgttagaggcttcagaaaaagaaaattagcttgaaatctagtctgggaaattgggggcagggaatgaaaaagttggtctcttgtttctccacgatacacaggcttcccatctaaagtcatgcttaactaaaagggaaaaaaaatgaaccaancaaaagtatatagagtagccgtgacatttgcattattttctagactttacatttgcctgcaacaggcataacatgaaactccagagggaatttggattgatagggaatgttcacataaacacccaccagnggctaactgttacacaacatttcaagtattcnaaanaactgcctggagacaaaaagcgaagggtccccagacccattnccccntccngttaggtcatgcaccaggatggtcccttcccaggtcnantggaaatcaaangcntgaaatggatcnggggcaggggaaacctcggccc

SEQ ID NO: 977 - DNA, 390 bp, Homo sapiens
ctgggtaccattccgggtcatccgcagaaattcctcatagatggcaactctgtctactctccgagccagtggcgagaagttacacagggagtccaccccggtgtggtgcctgttggggacagacctgaatgttgaaacttgacagtcagaaaaataactcttgatgctgctgtttcggaagagttggttgagcgcatcctcaatattccttttgttcctctggtaattggtggtgcctggctgggctttgtcctgggaatatggtaggttggtgatggtgaaattcaggtagaagtgctgggtgctggagctgcttgttggttgataaactgatgactccatttctgtcacatggatgtccaccaactggtaggtggagcccagccaatg

SEQ ID NO: 978 - DNA, 375 bp, Homo sapiens; identical to SEQ ID NO: 820

SEQ ID NO: 979 - DNA, 467 bp, Homo sapiens
  misc_feature (1)...(467): n = A,T,C or G
cgcggctgcagggtccggtcttcggtttgcacagctagaggccgcgcagcagcaaaggatgagcggaaccttggaaaaggtgctgtgcctgaggaacaataccatttttaagcaagccttttctctcttaaggtttagaacttcaggagagaagcccatctattctgtagagagagacggtcttgcttgtggcccaggcttgagtacagtggcatgatcatagctccctgcagcctcgaactcctgggttcaagcaatcctcctgcctcagcctctggagtagctgggattacaggtggaattctactaagtatcagtcggccctacaagacaaagcccacccacggcattggaaagtacaagcacttaattaaagcagaagacccaagaagaagaagggaaaagtggaagtgagagccattaatttggggacagattatgaatatggggntttacctgccgggcgg

SEQ ID NO: 980 - DNA, 218 bp, Homo sapiens
  misc_feature (1)...(218): n = A,T,C or G
nnacgagaagtcctgcaactgcctcctgctcaaagtcaaccagattggctccgtgaccgagtctcttcaggcgtgcaagctggcccaggccaatggttggggcgtcatggtgtctcatcgttcgggggagactgaagataccttcatcgctgacctggttgtggggctgtgcactgggcagatcaagactggtgccccttgccgatctgagcgcttgg

SEQ ID NO: 981 - DNA, 660 bp, Homo sapiens
  misc_feature (1)...(660): n = A,T,C or G
ccaactatgcctctcagaacatcacctaccactgcaagaacagcattgcatacatggatgaggagactggcaacctgaaaaaggctgtcattctacagggctctaatgatgttgaacttgttgctgagggcaacagcaggttcacttacactgttcttgtagatggctgctctaaaaagacaaatgaatggggaaagacaatcattgaatacaaaacaaataagccatcacgcctgcccttccttgatattgcacctttggacatcggtggtgctgaccaggaattctttgtggacattggcccagtctgtttcaaataaatgaactcaatctaaattaaaaaagaaagaaatttgaaaaaactttctctttgccatttcttcttcttcttttttaactgaaagcttgaatccttccatttcttctgcacatctacttgcttaaaattgggggcaaaaganaaaangaaggattgatcagagcattgggcaatacagtttcattaactncttnccccgttcccccaaaatttgaatttttttcacattttnncctgtatggaaaatgnanctttgtagaaacccnattnaaattganaannaaccttaactttcccctgtggtttgaantttccccaaggaattactccccgcggcaagg

SEQ ID NO: 982 - DNA, 580 bp, Homo sapiens
  misc_feature (1)...(580): n = A,T,C or G
aaaccaatcttccaggagattaatcaatgaaatttataagttttatcaacgtataaaatttttttcatcttctgggactcatagaatacaatctgtgtttctgaccagttgaggtagttaaaatagggagggcttttctaatttcgtatttgactatttcagaaagaaaggttatcttttactggtgagcacagtcattgctctgcagatgggctaggattcaaagaatataacacagtgttgttatcataaagagtgttgaagtttatttattatagcaccattgagacattttgaaattggaattggtaaaaaaataaaacaaaaagcatttgaattgtatttggtggaacagcaaaaaaagagaagtatcatttttctttgtcaaattatactgtttccaaacattttggaaataaataactggaattttgtcggcacttgcactggttgacagattagaacagaggaaccattggagtaaatttttcctgcccggcggcgctcagggcgaattccncacctggcggccgtctgtggtccactcggaccanctgggganntgggctanngttccgga

SEQ ID NO: 983 - DNA, 271 bp, Homo sapiens
  misc_feature (1)...(271): n = A,T,C or G
ccagtgccccccaggaggctccaccctcaactcaacccaagcaacagggacagatgaaaaacaaaatccaatcagggcgataaatagcggggggcaggacgtggtggtctccaggctggcttcgtgcgttcttgcttttgtcactgcccccctgttacatggggggggggnttaatttggtttctgagcgcataaagctaaggaggggtaaaaaaaaacaaaaaaaaaaaaaagggnaaattnccccnaaaaaaaaaangggggaaaaaaa

SEQ ID NO: 984 - DNA, 336 bp, Homo sapiens
ctgccaagctcaagtccagtggaatttatcaacaatttatcaccctgcccctgctctgctagacaatttcatgccttctcctttatccccatgctcctgagactgagcctttccaggagcccctcaacctgcttcctcccagaatccgggcaaggctacactggtttcccctctgcagggccctggccctgggagggggaaggctgactctaatggggaggaatcccagcttcagtggcttcaaggcaggccattcaacttaccgaccttggctacacacacccacgacacgcaacacagacgcagacacaagactggcacttgggatcacactgg

SEQ ID NO: 985 - DNA, 209 bp, Homo sapiens
  misc_feature (1)...(209): n = A,T,C or G
aaacatctcacatatacaaaataggtacaatttaatttttcttgnttnncccaaaaancaaagnttttgnggacccntggaanaanatgaaaatganactggcaaagaacaantgctgaatctgaagaagaggacaactttgggcaaataatctgcntncttttanttgggaataagatggaaaatntgantgctaaatcaaatttttt

SEQ ID NO: 986 - DNA, 236 bp, Homo sapiens
  misc_feature (1)...(236): n = A,T,C or G
aaaaatgngaaatgtctccacttagcgtagatcaatcaagtcagccatctcctaagaaatacacattatacaatgaaatctacaaagacacactttttaacttcaagcgttgttgattttcagcaaccctcttcccacatgaacatttccttgtaatgtaatgtatgacttttaatcttcttttggcagagtagggactttgagaattataatagcagttgttttgaaaagcacct

SEQ ID NO: 987 - DNA, 260 bp, Homo sapiens
gggaacgtcatcgtttggaaagcgtcgcaataagacgcacacgttgtgccgccgctgtggctctaaggcctaccaccttcagaagtcgacctgtggcaaatgtggctaccctgccaagcgcaagagaaagtataactggagtgccaaggctaaaagacgaaataccaccggaactggtcgaatgaggcacctaaaaattgtataccgcagattcaggcatggattccgtggaggaacaacacctaaacccaagagggcag

SEQ ID NO: 988 - DNA, 167 bp, Homo sapiens
aaacaaactatagaactcttcattgtcagcaaagcaaagagtcactgcatcaatgaaagttcaagaacctcctgtacttaaacacgattcgcaacgttctgttattttttttgtatgtttagaatgctgaaatgtttttgaagttaaataaacagtattacattttt

SEQ ID NO: 989 - DNA, 320 bp, Homo sapiens
  misc_feature (1)...(320): n = A,T,C or G
aaataaaaagtaaaagcacacagtgtataaaaaataataaaagccatcttaatattgcttacatcctaatactattagttatattcggggcaagcagactaggatattggtgttacttctataaagttaccttctgtttctaaatgctgtaaactaaactaaaacaggttacccagaaaaaagtggcnaattccaaaatggcttaatacctgtgacaactattgacttgagccaggtncaacatcgatgaaattcacacntacaatgtaaagttgaantaatccccaaattattttacattatntatgtatactttacaa

SEQ ID NO: 990 - DNA, 451 bp, Homo sapiens
  misc_feature (1)...(451): n = A,T,C or G
aaagctaaataagcgacaagtgataaactgacatattctattaaccccagcatgaggatacctcttctgcaatgatgtggcaaattatttattaaagcaaggtaaactttagcctcagatatagataactctcactcagaggaaagaaagaattttttgatcataggaaaaattggcttgtgccttttccccttcaaagaacatttataaaaaccttataacttcagtgaaatacacaaaatgacttatgctgacctggacttttttccccttttgaaaaatcgactaaaatatatatctttcaatttcccccttgaatatgaaaaacctgactaaaagaaaaagatgtttcctatgaaggtgncctctttgtnatanccantaggattttccanaaaatatttgattanaacccaanggtaggagaaaccttttcnttaancttcaatta

SEQ ID NO: 991 - DNA, 151 bp, Homo sapiens
gcatgaaacccctgtcacatatcccctagattgctcaatcaatcacgaccctttcatgtgaaatctttagtgttgtgagcccttaaaagggacagaaattgtgcacttgaggagctcagattttaaggctgtagcttgccgatgctcccag

SEQ ID NO: 992 - DNA, 211 bp, Homo sapiens
  misc_feature (1)...(211): n = A,T,C or G
aaaagccaaaaaatgggagacaatttcacatggactttggaaaatatttttttcctttgcattcatctctcaaacttagtttttatctttgaccaaccgaacatgaccaaaaaccaaaagtgcattcaaccttaccaaaaaaaaaaaaaaaaaaaattaattaatttcttttttccntcccggggnggncnttcaaaggggnaantcccac

SEQ ID NO: 993 - DNA, 59 bp, Homo sapiens
  misc_feature (1)...(59): n = A,T,C or G
ctgatncanncttaccaanggatgncagagccatgccatggtgaggggcttgcnaatgg

SEQ ID NO: 994 - DNA, 193 bp, Homo sapiens
  misc_feature (1)...(193): n = A,T,C or G
gaagcctgttttgttggaaggtttggtgtgtggagatgcagaggtaaaagtgtgagcagtgagttacagcgagaggcagagaaagaagagacaggagggcaagggccatgctgaagggaccttgaagggtaangaagtttgatattaaaggagttaagagtagcaagttctagagaagaggctggtgctgtgg

SEQ ID NO: 995 - DNA, 539 bp, Homo sapiens
  misc_feature (1)...(539): n = A,T,C or G
ccagtgtgtataaccccttccactatctcacagatagtcacagcgtccattccatagtctgtctcctcacatctgttagtattgacacagcacagacaccacaagccatcaggttcttcatggggcaggtgaaatacttctaccccatgggtaaatgtatttacatattaccaagagaagaagcacattatctatgatcttttggcccagttcttatttagcatttttattccagcctacttggaaacatgtttttatttgcaatatatgcctgactgaattaagctngcttggtttaaacaaccaaatcattggaangaaaanggatttaaanaacaagaatgcttgatctcagcggtgattaaaaaaaaatcaggggaaataaatgatcataagaanggngctttcaaacaactgctatnataatntnaaaggcctctttgncaaaanangatnaaaggcntcctttcnttccagggaaangttttgtgggaaaaagggttnttaaaacgaccanccttgaggttaaaaagggggcc

SEQ ID NO: 996 - DNA, 442 bp, Homo sapiens
  misc_feature (1)...(442): n = A,T,C or G
ctgaggtctcttgagggagcttagccaatgtgggagcagcggtttggggagcagagacactaacgacttcagggcagggctctgatattccatgaatgtatcaggaaatatatatgtgtgtgtatgtttgcacacttgtgtgtgggctgtgagtgcaagtgtgagtaagagctggtgtctgattgttaagtctaaatatttccttaaactgtgtggactgtgatgccacacagagtggtctttctggagaggttataggtcactcctggggcctcttgggtcccccacgtgacagtgcctgggaatgtattattctgcagcatgacctgtgaccagcacttgtctcagtttcactttcacatagatgtccctttcttggactcggccgcgaccacgcttaaggcgaatttccacncccttngcggccgtactatggaatcca

SEQ ID NO: 997 - DNA, 498 bp, Homo sapiens
  misc_feature (1)...(498): n = A,T,C or G
ttttttttagtgaaaataagctttattacatcaagtaataaatacatacaaagatgcaaacagttttagtcattttcttccagatgtttttatcaacttacaataaacgcagaactgagatctacttacagtcttagtatgaaagtgttcgggggtccttgttaggtttggtgggttgctctttcttctgtatttataacttgtgcatttttaaaaattgactttgaagcactaatagtcatgcaaatgcttaagcaaaaaagaagttacattaagcagaacctacattgtatggcaaatgggaaccggctactaagtaaagcgtgctgtnaatatgcgttcaaaacaaaatccctacagtgggtattagcttatgaaaagggaacaaagaacaccatgggtaacanatgtntacaaaagagaagaanaatggggagaccatggtgtcttggagggnaaactacaacctgcccgggcggccgtngaaggcgaaattca

SEQ ID NO: 998 - DNA, 453 bp, Homo sapiens
  misc_feature (1)...(453): n = A,T,C or G
cagatgcggaagacctcttatgctcagcaccaacaggtccgccaaatccggaagaagatgatggaaatcatgacccgagaggtgcagacaaatgacttgaaagaagtggtcaataaattgattccagacagcattggaaaagacatagaaaaggcttgccaatctatttatcctctccatgatgtcttcgttagaaaagtaaaaatgctgaagaagcccaagtttnnattgggaaagctcatggagcttcatggtgaaggcagtagttctggaaaagccactgggggacgagacaggtgctaaagttgaacgagcttgatgggatatgaaccaccagtcccaagaatctgtttacctgccnggcggccctcgaaanggcgaattncacacactgggcgncgttactagtgggntccnagttcggtccnaagcttggcgnaatnatgggcntta

SEQ ID NO: 999 - DNA, 581 bp, Homo sapiens
  misc_feature (1)...(581): n = A,T,C or G
acaaaaaaattcttttatgtacaatatcttgtctagagtctagcaaatatagtacctttcattgcaggatttctgcttaatataacaagcaaaaacaaacaactgaaaaaatataaaccaaagcaaaccaaaccccccgctcaactacaaatgtcaatattgaatgaagcattaaaagacaaacataaagtaacttcagcttttatctagcaatgcagaatgaatactaaaattagtggcaaaaaaacaaacaacaaacaacaaacaaaacaaaacaaacaaacaaaaaatcccaccaatcttcatgggtaaactttcctgctcagggatgtaagctgactctagaccatctcgcggttcctgcggatagcacagcacaagatcatactgaagatcatgccaaatatcatgaccacggcaatgccgatgcccactgcgccgatgatgtggaatttattggtcgaagacctcttttgatggcatcaggacangacttcacggngaaggtttcgagtcctccttccctncccggccggccgnttaaggcgaattcanccccctnncggcnttcctatggancc

SEQ ID NO: 1000 - DNA, 299 bp, Homo sapiens
gttccaggtgtatcttagctaaaactagagaatgccctaacttagatggtttttgaagcctatacaattggtattgtttgacccttaagcttttacatctcttagcatggaggacgaagaaagctgtacattgttgcttgagagtctgtacatttagtccagatttgtatttgcactgccagtatggcaaatgagtgaaaaatgtttaatacactattggattttttatttcctttttttgattcagcttatacccgggctgaaaacctcaatttatgttcatgacagtggggattttt

SEQ ID NO: 1001 - DNA, 333 bp, Homo sapiens
ttttttttgaattttaatatgatattttattatgggtgtctgtaaggaaaaaaaagatcaacaaccacatacaagcttacaaagttaaatttcaacacattctctatgctagtgtgacaaaagcagccccataatttggtttttattgttgacctttacaggatgaaggaggagaatcccctgtggcatgccaatgaatctttctgatgggagacatgtacagattttgtgcatttatgttctgaatgcaagtcaacaattctgatctagagtttaaaagtgaaagtacattagcaccataacatgcgtctttaaagccttcccaaatattaa

SEQ ID NO: 1002 - DNA, 367 bp, Homo sapiens
gcagaacaaatcaagcacatccttgctaatttcaaaaactaccagttctttattggtgaaaacatgaatccagatggcatggttgctctattggactaccgtgaggatggtgtgaccccatacatgattttctttaaggatggtttagaaatggaaaaatgttaacaaatgtggcaattattttggatctatcacctgtcatcataactggcttctgcttgtcatccacacaacaccaggacttaagacaaatgggactgatgtcatcttgagctcttcatttattttgactgtgatttatttggagtggaggcattgtttttaagaaaaacatgtcatgtaggttgtctaaaaataaaatgcattt

SEQ ID NO: 1003 - DNA, 388 bp, Homo sapiens
aaaaaaagtggggagagggtgagagtcgtaaggggcaatagcaatagagattacactgtgctgacacagagactaaattctagtcagagtgaagacccatataaaaggccggctgatggtttaaaggaagtaaccacatggagtctaatcgagacattcatgagttacatctcattattagccttagtaatgtaagaaaacaattctcaacaaaactggagtccacagttgtcaagtatgctttctcaggcacgggtaggtaaaagtctggagaaatgggttctctccatgcccaatgacaaagcaagacggtcctaggtttgaggttaagagcaggtcccattgccgggcggtatccgcagctcacagacctcgggccgcgaccacg

SEQ ID NO: 1004 - DNA, 211 bp, Homo sapiens
gctggggttggctccatgaccaaggtctatgggggacgtcagagaaacggcgtcatgcccagccacttcagccgaggctccaagagtgtggcccgccgggtcctccaagccctggaggggctgaaaatggtggaaaaggaccaagatggcggccgcaaactgacacctcagggacaaagagatctggacagaatcgccggacaggtggcag

SEQ ID NO: 1005 - DNA, 318 bp, Homo sapiens
  misc_feature (1)...(318): n = A,T,C or G
aaaatgtacccaactgggaccaaatacaaacatgagacactagggtggcttgtccttgattaggaattaccagcttaaggaactttatcatgggctgagagatagatagatagcttagaacaacattgcaaaagtgggtgcttctacatgaggactttttttccccccaagtagnacaataattaaatcttgtgtttctttatattgtgctttttttgggagaaagcaattcatttnccgatctaaannntgccggatacaaaggtagttcaganacntaataatggtccctccaagaacaagggagcaancccccta

SEQ ID NO: 1006 - DNA, 491 bp, Homo sapiens
  misc_feature (1)...(491): n = A,T,C or G
aaatgactaaaaacgaggccacactttaattcaattggaaaggaaatgcagttggaaacagagcataattaacgctactgaaaagatggatatttgggaccaaagttcatttgctccagttgagagtaagttttcaggggattaacttgggaatggtgcagtgtaatctagatcacgctcccaagacctgcaccaaagagaattatggttgccttttgagctactgtatgactctatttgcctttcacataactagcttccccaagcagatctgcctgtgaatattagacattactatggtgttagtgatcactcccagtacccacagtccatctcataattggaaagtatgaataggaaagtatttgtaatcagtgtcattgcaggggaaggagtactctangccagtggcctaaatcaatggacctggcccgggcggncgctcnagggcgaattncacccactgngcggncgtatctagngggatccca

SEQ ID NO: 1007 - DNA, 491 bp, Homo sapiens
  misc_feature (1)...(491): n = A,T,C or G
gcgagaatgaagactattctcagcaatcagactgtcgacattccagaaaatgtcgacattactctgaagggacgcacagttatcgtgaagggccccagaggaaccctgcggagggacttcaatcacatcaatgtagaactcagccttcttggaaagaaaaaaaagaggctccgggttgacaaatggtggggtaacagaaaggaactggctaccgttcggactatttgtagtcatgtacagaacatgatcaagggtgttacactgggcttccgttacaagatgaggtctgtgtatgctcactcccccatcaacgttgttatccaggagaatgggtctcttgttgaaatccgaaatttcttgggtgaaaaatacattccccnnggttcggatgagaccaggtggtggtntggtcagtatccccacnccccnaaagaggaatttaatncttgaaggaaatggacatttgagcttgtccccccccccccggnttt

SEQ ID NO: 1008 - DNA, 346 bp, Homo sapiens
aaaccaatcttccaggagattaatcaatgaaatttataagttttatcaacgtataaaattttttccatcttctgggactcatagaatacaatctgtgtttctgaccagttgaggtagttaaaatagggagggcttttctaatttcgtatttgactatttcagaaagaaaggttatcttttactggtgagcacagtcattgctctgcagatgggctaggattcaaagaatataacacagtgttgttatcataaagagtgttgaagtttatttattatagcaccattgagacattttgaaattggaattggtaaaaaaataaaacaaaaagcatttgaattgtatttg

SEQ ID NO: 1009 - DNA, 143 bp, Homo sapiens
aaagccttcccaaatattagtaatcttgaccagcaatgacaagaaaaaagaggagcacctttacaagcagttgatatccaatattaaaataattgtggctttaaaaatatttctttaaattcttgcattacacttttcttttt

SEQ ID NO: 1010 - DNA, 716 bp, Homo sapiens
  misc_feature (1)...(716): n = A,T,C or G
ctgacaggtgtacttaaaaatactgaattgacagctacattgaatgcagggtttcccagggtagttctcattttgtcacttactccaattacattcaaggtcgttatgcctcatctttttcctgagctgtggcagctctaactggggcacccagagagatacataccaggtaatctccacttctacttttctggtagcttggccctggcaaaatgagccccacaatctagaaagtaggatgctaaacaaagttgaatcaacatatctttttagaaaatatcaggttagagaatactcctgaggacctgtttctaaccagagttgacaaatgtgaaaaatgcatcagctagacagcagtcatgtgaacacagcccggaactgcaagtcaaggaaatgggttctgggcccgccttcccangtaccaaaaccattattcaaaagcaactactgaaaatgccagcttgntggggaaaagaaatggggaaacgngataaatccaattaantgcatgnatatncatgaatacnaaagctatatggaaaaaatnaaatcaaaccctttnnacnaagaagaattggnnacctcctantttttggcccaangtaaaaatnaaaaacnctgggataaattttgcccttaggcctttnntgtgagggaaanatttaacttggggaaaaaaacgattttanctgnccggggggccccccaangggnnt

SEQ ID NO: 1011 - DNA, 565 bp, Homo sapiens
  misc_feature (1)...(565): n = A,T,C or G
ctgcagaatggctcccgcaaagaagggtggcgagaagaaaaagggccgttctgccatcaacgaagtggtaacccgagaatacaccatcaacattcacaagcgcatccatggagtgggcttcaagaagcgtgcacctcgggcactcaaagagattcggaaatttgccatgaaggagatgggaactccagatgtgcgcattgacaccaggctcaacaaagctgtctgggccaaaggaataaggaatgtgccataccgaatccgtgtgcggctgtccagaaaacgtaatgaggatgaagattcaccaaataagctatatactttggttacctatgtacctgttaccactttcaaaagtaagttctccatcccataaagccatttaaattcattagaaaaatgtccttacctcttaaaatgtgaattcatctgttaagctaggggtgacaaacgtcattgaccctttttacctcgggcgngaccacgcttaggggcgaattncanccacttgcgggccgttctagnggatccanctcggaccaagcttggcgnannatggggcatagtg

SEQ ID NO: 1012 - DNA, 407 bp, Homo sapiens
  misc_feature (1)...(407): n = A,T,C or G
ggcgttttgatgccatgccgtttactttaagagcatttgaagatgagaagaaggctcggatgggtgtggtggagtgcgccaaacatgaactgctgcaaccatttaatgttctctatgagaaggagggtgaatttgttgcccagtttaaatttacagttctgctcatgcccaatggccccatgcggataaccagtggtcccttcgagcctgacctctacaagtctgagatggaggtccaggatgcagagctaaaggccctcctccagagttctgcaagtcgaaaaacccagaaaaagaaaaaaaagaaggacctctgncgngaccaccccnanaggggaattncaacacncntttgcggcggtcttntggcntccagctcggtccaacttggggtaatcanggggtcc

SEQ ID NO: 1013 - DNA, 237 bp, Homo sapiens
ctgtgggctaattgccgccaatttcagcctgccacgattcttggaaatatgtcttccaagtgccatccatcatcagtaggacaagtgtcgggagtttgtttatttttttccagtagcaacgatgggttacatggagccatgaaacctccttctggcctcccttgtgattaatggcatgtgtttgtaaaatggatagctggggttggcagatggctagagaagaatcgcctttggttt

SEQ ID NO: 1014 - DNA, 669 bp, Homo sapiens
  misc_feature (1)...(669): n = A,T,C or G
ccagggattgtcggtgcagggtctgcaggtaggcagtcaggttgtgaatgcgctgggcatccagaaacttgcggatcacgtaggatggctccaactttccaatggttcggatatattgctggacagccccatcgtggttgcccttgctgtagagatggtctccatactgcatgaaaatctgggccggcccatcactgtccagatgctggctcttggcaaggttaatcgccatctcaaataggttcttcttaaacagcatctccagtttggtctgtgtgtccttctcctgcagtgcgtggacccgcccatcccgcgtcagcacgtacagggagccccactcagcaagcacatccactacatcctcaaagacggtgctataggctatgaacttgttgcacaggtcatagatgtttanaatctgcttgtcggagctctgtgaatccctgctggtaaactcttgacttggganaaaaccttccggcacgggagacaatgataaggtngcctctaaaccagtggcaatgaacttatggccctaaaggcaaacaaggccacgttcatcaggtggacagnagaacctatcccggcncatgaatgagnctaaaaggcctanggtacacgaagcncacctgngcactcccaggantttcaagcttntgantgactcng

SEQ ID NO: 1015 - DNA, 494 bp, Homo sapiens
aaataaggtgatagtaaattataccttgtagttaatagtaatcaatcaatcaatcactacagtaatcacaaataaggtaaagtctaaattactgccttagcaaacactatgttgtcaggtttttctgctgcaagcccaaggcgggaaacactgcagttattagaagtgagcccaatgatgaatttgcatttgaagctgggagaaagaggaaaaaaagtgtgttctgattatggcatcgagacactgtagcctaaaaaagcaactttattaatgtcctgcagcagcgtacattagtaattataacaatgcattaaaattttcatttcatgtcatagagaatcagttttcttcatgatacattatgttttactgagtgagtttgtccctccagagacctttctgggaacatgccttctccagggactgcttcctaagatgcccaggttgcttaccacaggtcatctttggtcatttacctcgggccgcgaccacgc

SEQ ID NO: 1016 - DNA, 98 bp, Homo sapiens
ctggcaaaataacacacagtacacaaagaacagtgtattttacagagtcagtaatgaaaactgacagctctttagcagatatgcttttttcatttttt

SEQ ID NO: 1017 - DNA, 458 bp, Homo sapiens
aaaaagatgtttggatatatttgagtattccgatcatgaaaacagaaattgccctgcctactacaaggacagactgatgggaaattatgcacctggtcaacttagcttttaagcagacgatgctgtaaaaactaacggcttctctgatatttattgtaagttttagtactgatctccttttccagtgctgcacactcctggtttggaactttaatagcgttgcaacgaaatcctatatccagtttcctgtaatttaattgaagaaaaatacatccaaataaagactttattattaacagaccagatagcatcagaaatcatgtgactgttatgattatcagaatgtcttaactttttagggcaaagttaacactgaaagttctagcttaagtgttgaaacttttgtgggaaaaaaaatcacttttgaaactcagacttcagtgtatacccaataattt

SEQ ID NO: 1018 - DNA, 654 bp, Homo sapiens
  misc_feature (1)...(654): n = A,T,C or G
ccattcttgaaagaaaaaagctgcaaataacattttcaagaatataaaaaaatgagtaaacaaagggaaggttgtttggtcatttatagacaattaagcacagactgtagatgtccttccaattcttgggaggctaaactgagtctaccatttcttacatttcttttacctattttttgagaattgccagttgtacagtgtttagcatgtggaatgtaccaaatatatctatgttgtgacttaagatattctaaatgtggataacttctgacctaggaaacatgaagtttgtagtgaagtaagtgaaaagaatgttcaggaaattttttttctccatctcttcagttggcatttattgagagttttatttgaatgcttattaaaagtatatgatttataatatttagaaaatagaagaaaaaagaaaactgtagatgttttatcttggtttaatactggatggtttagtaccgtataccatttatggttctagtgggatcaaaatntttcattttcattaaaagtgaatncaaattttcccttattnnaaggcccattttacctcggcccgcgaaccacggcttaggggcgnaattccancaccnctggnggccggttncttangggatccnancttnggtnccagnttggggg

SEQ ID NO: 1019 - DNA, 240 bp, Homo sapiens
  misc_feature (1)...(240): n = A,T,C or G
ggcagggcctagctgctacaaagaagacatgttttagacaaatactcatgtgtatgggcaaaaaactcgaggactgtatttgtgactaattgtataacaggttattttagtttctgttctgtggaaagtgtaaagcattccaacaaagggttttaatgtagatttttttttttgcaccccatgctgttgattgctaaatgtaacagtctgatcgtgacnctgaataaatgtctttttttt

SEQ ID NO: 1020 - DNA, 398 bp, Homo sapiens
  misc_feature (1)...(398): n = A,T,C or G
ctgctcttcatttattttgaaagcaaattcatttgaaagtgcataaatggtcatcataagtcaaacgtatcaattagaccttcaacctaggaaacaaaattttttttttctatttaataatacaccacactgaaattatttgccaatgaatcccaaagatttggtacaaatagtacaattcgtatttgctttcctctttcctttcttcagacaaacaccaaataaaatgcaggtgaaagagatgaaccacgactagaggctgacttagaaattnatgctgactcnatctaaaaaaaattatgttggttaangttaatctatctaaaatagggcattttgggaatgcttttcanaganggncaantaacagtcgtacagctanaaaagtccctgaaaaa

SEQ ID NO: 1021 - DNA, 363 bp, Homo sapiens
  misc_feature (1)...(363): n = A,T,C or G
gaggtcagaagataaagacatcctacctttgagccttttagaacaggtatccagggattttacctctccagngctangcagggtctatgcccataacatcagcaggaagcagttacagaagatgaacctccgcccttctgcaagccccttaagattaaggaggagtatataatctctgatggggaaatgaggtaggagaccagaaggacttattttccattcccaaccccattgaacagagcaggatctggtcaaaacagggtgcagtggagaagcctgctgaaaccagcagatgatgatgaaagtgacctctagttgccctcactgcttatgagcataaagacactaccactgggaccatgg

SEQ ID NO: 1022 - DNA, 479 bp, Homo sapiens
  misc_feature (1)...(479): n = A,T,C or G
aaaaagtatgttctaaaattattatatatacatgggtgaattatgtttccgaggcactgttttatctctgtgaatcttgaataacttttttatatttgggttatgatgtcaaacgatcctaagcgaagatgatttcagttcatcaaatcatcattaatgactttatgtattatttgcacagggagaattgaaactgagtataatcaataagctagatcgaaaatcagtttctcaaactgagcttcagaaaagggcattttggactcttggttttgcataactgggtttggtttttttgcagaattaactataaccaatcactngcttcccgaagnaaacctggatgtacctggaatnccattattaccataacctttccaatttntttaccnactttctggtttangccgaaccttgggattacccttatttttnccggggtccngaatttaaaaaaaaaaaaaaaaaaaaaaaaaagc

SEQ ID NO: 1023 - DNA, 465 bp, Homo sapiens
  misc_feature (1)...(465): n = A,T,C or G
ctgggtaccattccgggtcatccgcagaaattcctcatagatggcaactctgtctactctccgagccagtggcgagaagttacacagggagtccaccccggtgtggtgcctgttggggacagacctgaatgttgaaacttgacagtcagaaaaataactcttgatgctgctgtttcggaagagttggttgagcgcatcctcaatattccttttgttcctctggtaattggtggtgcctggctgggctttgtcctgggaatatggtaggttggtgatggtgaaattcaggtagaagtgctgggtgctggagctgcttgttggttgataaactgatgactccatttctgtcacatggatgtccaccaactggtaggtggagcccagccaatggaatgaggacctcgcccgcgaccacgctaagggcgaattccancacacttgtggcgccgnnnctagtggatccga

SEQ ID NO: 1024 - DNA, 210 bp, Homo sapiens
aaacaaagcaaaacaaaaccaccaatcctaataacccccctccctgccccgtctccacgctgtgcggagagggctctagcccctcagtcggacttctccttctccttcatgtgcaagaagacgatgctgaagatgaagagccccagcatcatggagaaggcgctggcgtagtaggggtaggccgaggggatgaagcgctcatactgcgtg

SEQ ID NO: 1025 - DNA, 609 bp, Homo sapiens
  misc_feature (1)...(609): n = A,T,C or G
ctgggtaccattccgggtcatccgcagaaattcctcatagatggcaactctgtctactctccgagccagtggcgagaagttacacagggagtccaccccggtgtggtgcctgttggggacagacctgaatgttgaaacttgacagtcagaaaaataactcttgatgctgctgtttcggaagagttggttgagcgcatcctcaatattccttttgttcctctggtaattggtggtgcctggctgggctttgtcctgggaatatggtaggttggtgatggtgaaattcaggtagaagtgctgggtgctggagctgcttgttggttgataaactgatgactccatttctgtcacatggatgtccaccaactggtaggtggagcccaccaatggaatgaggcattcagggtcttatctagaaagacttgctccaccaggctggggtccaaattggaggagaacaatgccttgacagngaccacacggagtccatcgtcaattggtgaccaggcagaancggaatgtgtcatgagttgactgnctttgtananggggngaccttgnctggatgncctcacaggggatgacttgaggatgnggggctggntactg

SEQ ID NO: 1026 - DNA, 590 bp, Homo sapiens
  misc_feature (1)...(590): n = A,T,C or G
ctgagaaatctaggtggattcatattcgtaatcattgattaacatgcacatttgggtttgcacatttttgtttatcatacatttttctccgttttctattaaagaacatgctctaggggaactattaatagcccaccagtcgggtaggcagcattcaatccttctatgccttctttcgccacctgttgaggtcttncttctgaaacaaagaagaaatagacaaatcagacttgccctcttggaaatgtggtccagatttctctactcccaagctccaaaaaaggcatacattggatgggctagatcaactcctcctgagagccataaatccgccaagagttgttttccatgtaagggtgtggtacaatggggaacgcctgatgttggaggaaagcaggaggactttagagtggagttgcattctaatctctctgccgcttcaactatgtgacctggggcaaatgatataaactctatgagcctctttccttatctttacctgcccgggcgggcgctaagggcgaattccanccactttnnngcggttctannggatccaactcggaccaancttggcgtaatatgggata

SEQ ID NO: 1027 - DNA, 396 bp, Homo sapiens
  misc_feature (1)...(396): n = A,T,C or G
gtggtctcgagctcccaaccttgtgatccacctgcctcggcctcccaaagtgctgggattacaggcatnaaggataacgttttttttncccatcactggcacttgcccttaatccaagtcnttttgnancccccctttttgtttttgggcctgcttaattagctatatgcatcctcnagggctgagaaggaaggaagggaaagtccccaagtggatttttagtcttcacccaatgcagaggcagttttgagttctgtggacagcanaagcttcanttctttgatgtatctatactgggacctgcccgggcggccgntcgaaagggcgaattncancacacttggcggncgtactagtgggatccanctcggaccaaacttggggaaacatggcata

SEQ ID NO: 1028 - DNA, 282 bp, Homo sapiens
aaaaacaaaaacccttaacggaactgccttaaaaaggcagacgtcctagtgcctgtcatgttatattaaacatacatacacacaatctttttgcttattataatacagacttaaatgtacaaagatgttttccacttttttcaatttttaaacacaacagctataaacctgaacacatatgctatcatcatgccataagactaaaacaattatatttagcgacaagtagaaaggattaaatagtcaaatacaagaatgaaaaacgcagtacatagtgtcgcg

SEQ ID NO: 1029 - DNA, 311 bp, Homo sapiens
aaaggcaaagctttattttcatctctcatcttttgtcctccttagcacaatgtaaaaaagaatagtaatatcagaacaggaaggaggaatggcttgctggggagcccatccaggacactgggagcacatagagattcacccatgtttgttgaacttagagtcattctcatgcttttctttataattcacacatatatgcagagaagatatgttcttgttaacattgtatacaacatagccccaaatatagtaagatctatactagataatcctagatgaaatgttagagatgctatatgatacaactgtgg

SEQ ID NO: 1030 - DNA, 144 bp, Homo sapiens
aaaacaagcaaattttattaaaggaaaattttgcaggtttaaggtttgcaggtgaaattttgtaggtgaaaaggtttacttttcaccagtctgttctggcatgcttctaatgatgtcagagtcacctggatcaatgatagccag

SEQ ID NO: 1031 - DNA, 79 bp, Homo sapiens
aaaagttgctattaccaattctgtctactgtagcaagataccttaagttacaacaaaatcttaggaaataagactgaat

SEQ ID NO: 1032 - DNA, 550 bp, Homo sapiens
  misc_feature (1)...(550): n = A,T,C or G
ccaggagctgtctttggggctggggatacaacagagaaacaaaccaggtgttgtcatttcccagaagtcacaatatttcaagggaaaanttnnaatccaggtttcactgntttcaaaccccaggttgattattaagtggacagcntttcctgtagtccagggaggcccaaagaatgttcgtagagggtcttggnttagggtttcttattaacagagtgaacaggaaccaaacaccaantggaaatggagggtgatggctttggtggggggggtccagtctaattgttcttcatcgtctcctggatccagtccacatatttgcagactttcgtgtnnacccangcttttcgggtgatccacacnggatcctggccccagganataatgccttgaaaanactggttcaaaccaaaaggcccccggagtcccctggnaggatccttgccccttctcacctggacacccatggngttntatttcccgggagcgtctacctttgggtaactngcgnaccctagggatcacnctggctctangncactgccactgg

SEQ ID NO: 1033 - DNA, 293 bp, Homo sapiens
aaatcacgttttgtttctgcaaatttgggagacaaattgagttcttactggaatgtggcctatcgctggttgacaaatctgaaatggaatgtctccaaatggcagtgcctccctttccgccctccctaggaccacaccaataaccagctcccaagcacaagttcttgctcccattttttctgtaggggtgggggtgggaccttcaggctgctatctttgccatctgctgttctaacttggaaatacgctcatcttgattgcagattgtgtcttttatagatttgatctctttt

SEQ ID NO: 1034 - DNA, 605 bp, Homo sapiens
  misc_feature (1)...(605): n = A,T,C or G
ctggcattccttcgacttctctccagccgagcttcccagaacatcacatatcactacaaaaatagcattgcatacatggatcaggccagtggaaatgtaaagaaggccctgaagctgatggggtcaaatgaaggtgaattcaaggctgaaggaaatagcaaattcacctacacagttctggaggatggttgcacgaaacacactggggaatggagcaaaacagtctttggatatcgaacacgcaaggctgtgagactacctattgtagatattgcaccctatgacattggtggtcctgatcaagaatttggtgtggacgttggccctgtttgctttttataaaccaaactctatctgaaatcccaacaaaaaaaatttaactccatatgtgttcctcttgttctaatcttgtcaaccagtgcaagtgaccgacaaaaattccagttattatttncaaaatgtttggaaacagtataatttgacaaagaaaaatgatacttctcttttttgtgtccccaaatncattcaaagctttgttcttttccattcattnaaagttcatgggtatataaaactncnttttaaccctggtttctgatctacct

SEQ ID NO: 1035 - DNA, 695 bp, Homo sapiens
  misc_feature (1)...(695): n = A,T,C or G
ccagtcatttatttttccagtaatttaaagctgtgactaggagacacagcctctgtgggttgtgagggttgagatgatataaactcaggagctgtcgggtggacatgttcactgagaaggacagtcagtccacagagagagaacaccgccaacatgcaggggggtctagagaacacagaccatgtggatccgagagtgttggaggggcagctctagcttctctgggcttttcggatccgagttctgttcctgggaggcctggctaaaatctacccttgggccctgcactcctccccatggctatattgcaaatatcctatactttgcatgtgatcacacaaagagggtttctgttactggcacacaaaaagtttgcctgagatgattctcctccacttccatcagggtcttctggcattgatttcaacttattctctcttaagaacccattgagtccccataatctcttggttctttcttttccaggaccactgctacagttcaaacctcattttgctntattacttggaccttgatggntgatgcctaacanacccaggtttttaaaaaccttnttntccccttnaaccttgggatcccctttccttnacccccatggcncctgataccncctgggtccattnccaaacncncccagggcnggaagggtgttaaaatttnccaanccggtaaaa

SEQ ID NO: 1036 - DNA, 245 bp, Homo sapiens
aaaaagtagttagcatttaatgaaactccctccatgtggcttcaagccaccaggacacaggcccccccaacactcttaatcttctcctcagctcttctgctgaagaatttggccttcacgatgacaggctgctttgggagctttccctttcccagaactttgtagtagcccgatcgcaccacatcaatgatgggagcagcccccgtcttgtttttagcagcattcacccgtgtctgttcactgac

SEQ ID NO: 1037 - DNA, 229 bp, Homo sapiens
ttggacccttacacacttcctaatgacagaatttggctgtttggcttcaactcctactttttccagcacgattccttttgcatgagaagcacctccaaaagggttggcctttagggctgtgcccaaatgagctttcttatactgtttatcatgccacttctggtctcgtcggtgactacggagcttcctagcagtacgaagtccacgacacttgcccatcctgtcggcg

SEQ ID NO: 1038 - DNA, 192 bp, Homo sapiens
gtgggacttactccctcctctcctttgagaggcccatgtgtcgctggggaggaagtgaccctttgtgtaactgtaaccgaaagttttttcaaaaatcctagatgctgttgtttgaatgttacatacttctatttgtgccacatctcccctccactcccctgcttaataaactctaaaaatccacttgtattt

SEQ ID NO: 1039 - DNA, 214 bp, Homo sapiens
ctgcagcccatcctcccggctccctcctagtctgtcctgcgtcctctgtccccgggtttcagagacaacttcccaaagcacaaagcagtttttccccctaggggtgggaggaagcaaaagactctgtacctattttgtatgtgtataataatttgagatgtttttaattattttgattgctggaataaagcatgtggaaatgactcaaaaaaaa

SEQ ID NO: 1040 - DNA, 524 bp, Homo sapiens
  misc_feature (1)...(524): n = A,T,C or G
ctgtgggtggttttcctgttacgacgctcagtagcctgtagcaataacaaactcgtggctatgaatgcagatgcagtgttctcatagaataactgttcctgcacttttacagacaaatctacgacaaaaaaaaagatcaactttttttttccgaacaacaaaaaaaatgaatgattacaataggaaagggaaaaattaaatagctacatatcattaacaaattaatgttcttcaaaaaatacctacaaatttctctgtacattntttacgcacagcgtaacgatggtctcaaaatcacccatatagaaaagtgttctcaacnatttttcctacagaaaatataggggcctgaatgccaaagcttggaagcccagtacantgggagtgaaatgtgtgcggggcaagganaagggctttttttcctcccttttcaaaggctgcaccactctgtgactacaaanccagcctccaccttttccccangccattccaaatcacactaaaactgaaaccggggnatcggt

SEQ ID NO: 1041 - DNA, 429 bp, Homo sapiens
aaacaagactccagtatgtgaaggttaattgctgtgctccacagatcttgtctattggcccctgtagaaagttaacctttgttgttttccttttataatttgcttattgcacaattgctttagggtaagtgaattatattaagatgccttgaaattatagcactccttgattaagaagctaaaatgtttctctcatttactccttaaacaaaagacttaaattagtttgggtcattattacttttattttgcagcatttggtttgttattagcgtaagagcaagtataggatatggagaggcccctggcttcatgagaacaaaggcaggcccaggttataattacagctttctcctgccccttctttactttctctaccacagtcttctccactgtttgttttcctcttgccacaatttgctaacattt

SEQ ID NO: 1042 - DNA, 313 bp, Homo sapiens
ccagagtctgtcacactaagatgagaaatgtcctttcttcctgaaggtgtctgatgtgtaaaaatatgatatactttgtgctgtttcctcccttcccttttgcatattattctgaaacaacattaactagttactttgcgtcattgaaggtatgcacttcccctctatgttaggagtgaataaaattaaaaatagatccttataacaaagaaaggcagatagaatgattaaaaatgaccaaaacatgttagaaacagtctctcaggtgtatgcagatggtaattacaaaaatactttttcaaaaagaaaaaaa

SEQ ID NO: 1043 - DNA, 299 bp, Homo sapiens
aaatttgaccaaaaaaaatttattgtacaattacccaccactggatttgactcagagaggacccccagagggtgtctccatcttccctatttattttcagcccttgagggcttcattgtagatcaaagccaaggcccccaggaaggtgacatactcctggaagttcacctcctggtccttgttccggtccaagtcttccatcagccttgcaatttcagcatcctgcagcttcgagccaatggtgagctccttctggatcagctccttcagctccttcttgctcagggtgtgcttgtcac

SEQ ID NO: 1044 - DNA, 135 bp, Homo sapiens
aaagcgctgatcctgtttatttggcaggaaaacgagacaatccagcagcccaggagggacaggtggacttaatcctcctcctcgtcgtctccagccccagccccaccctggcccttcttggcattcttcctcttc

SEQ ID NO: 1045 - DNA, 608 bp, Homo sapiens
  misc_feature (1)...(608): n = A,T,C or G
gtatcctagctgacaaattattgattaataagaacttgaatttctggaagattcttactgttaaccaaattttgagcaaggagtctcaaaggtaattctgaaccagaattacatgttaatgaacagtgtaccttttaacagtgtaaatcacggaatatccgtgaagggatttcttaatttattttttaccggttgattgaaatatcagttaaaggttgccagcatggttgcagataaactgatgtttgaaattcgctgaaatacttaatgtggaataggataatatacttccaatgccctcaaggctgtgaccttacagccattttacatagcacatcattcctcctatagggatgaactttttcctggcacgaaaagtagcccgctctggttgaagctttgcttattgtaacaggcttttatttccaggtaatatgtctttggaagacttaatttgattanagatatagatattctggaaactaatggttttttctatgaccctgctttatcaaaaagtaaacattacctcggccgcaacccctaaggggaattccaccacntgnggcgntctatggaccaactcgnaccaacttgngaatatggct

SEQ ID NO: 1046 - DNA, 347 bp, Homo sapiens
ctgttaaagagtggaggacacccttgaccctaacaaggaaaacaaattaagcctttatgtacaagcaaatttagagctcttttaagtgtccaaagctattaattagtttaattaaggcattaaactaattctgaattaacatttttataaccaagaactaaaatgttcaaatttttttctagtacaaaaaaattaaatttgctttagttataaaagagctctgtcaatatacacaaactatatacttcagacattcacaaaaatgtgagcagaaggcttatcaaaagacatttaatacaattagttttcaacaaccccttggtggtccacatctacaaagatatcca

SEQ ID NO: 1047 - DNA, 307 bp, Homo sapiens
gccaccgaaagcggacaccctgactctcagaagcccccaacgcatcccgggacgagtgacagctattctgcccccagagactgcctcacacccctcaaccagacggccatgactgcccttttgtgaacacaatgtgaaagaagcctgctgtggtactgagcgtcgggctgtcacaaggcactggaagaagggagcctgctggtccagagtgtgcgtgtgtatcggtgtgtgtgtacacttgcatgtgtgtgtgtgatccagtaggatcctagagacaacctgtcatactgtttacaaaattgtgcag

SEQ ID NO: 1048 - DNA, 227 bp, Homo sapiens
tggaagatggacgcaccctgtctgactacaacatccagaaagagtccaccctgcacctggtgctccgtctcagaggtgggatgcaaatcttcgtgaagaccctgactggtaagaccatcaccctcgaggtggagcccagtgacaccatcgagaatgtcaaggcaaagatccaagataaggaaggcatccctcctgatcagcagaggttgatctttgctgggaaacag

SEQ ID NO: 1049 - DNA, 720 bp, Homo sapiens
  misc_feature (1)...(720): n = A,T,C or G
tggnaaattttgttaaataaccggaacnttcactttattagggggccggaaaattttgggggccccccttctttaggaatgggccattggcnttccgaagcccgggcnccgccccagtgggtggaattgggaattattctttgccaagaaaatttccgcccctttaanccgttggggtccccnggcccgaagggtcttgaaaccaaaaaaggaanttccttggccntttgccaaaaacttcaaaanccccccaccttggcantcccnaattgggccnttattnaacccgcaaaatngtcctttcgggnttnaaaaaactgggaagggaaagtgaaacacttggnaantaaaanaaaccgggnntttgcnttnggtnaaaacacacatcnattttgcacctgggaacccaaaaccnaaatgggtttgttcggtgccacccnaccaaaattgactantttgttggacttaaccaacaatttcttgttgtnaaccacaagggtcncttcttttncntnggccaaattggggagggcatggaaaaatccaccgnaaanttnaaaanaaactggaatnatatttttggntttgggccnnttagaacaaaaacccgnaaaaaaannaattggaaataaacttttncccttgnaatnttttttncaattaaaactnaattttttantttttncctncccnggngggncctttnaaaggggnaattca

SEQ ID NO: 1050 - DNA, 617 bp, Homo sapiens
  misc_feature (1)...(617): n = A,T,C or G
aaacttccctctgtggaagatattcaaaagccacaagtggtgcaaatgtttatggtttttatttttcaatttttattttggttttcttacaaaggttgacattttccataacaggtgtaagagtgttgaaaaaaaaattcaaatttttgggggagcgagggaaggagttaatgaaactgtattgcacaatgctctgatcaatccttctttttctcttttgcccacaatttaagcaagtagatgtgcagaagaaatggaaggattcagctttcagttaaaaaagaagaagaagaaatggcaaagagaaagttttttcaaatttctttcttttttaatttagattgagttcatttatttgaaacagactgggccaatgtccacaaagaattcctggtcagcaccacccgatgtccaaaggtgcaatatcaaggaagggcaggccgtgatggcttatttgtttgtattcaatgattgnctttccccattcatttggctttttagagcagccattttacaaaaacagtgtaagntgaaacctgcttgttgcccttagcaaccaannttcaaaattcntttanaancccttttaaaaacnacanccctttttnagggtggca

SEQ ID NO: 1051 - DNA, 366 bp, Homo sapiens
aaaacaggtacaaaatattgaaatgaccaacgttacatgatttcaagggttgtcctttctgtgcttttatctgtcacgacaggaaggtgtggaaagtttatatcgtttatatccttaatttgactactcttggatattaaaatctttctattaattaaaaagacttttagacaacctcttaaatggaattacactatggaaaacagggctcccccaaaaacacctaggcagaactgagagttctttgaaaaccattcccaataaaaactaaatgaaaaataaatataaaacaaagcttaaaaaaatatgcattacctgacaccaaccttttctggctgacaatatttattcatgaaaacatatcag

SEQ ID NO: 1052 - DNA, 86 bp, Homo sapiens
aaaaattagtgtctcaaaaaggggacatcataagggaaatacagggtttagaggtctgagctcaagtggtgtaagacagttctttc

SEQ ID NO: 1053 - DNA, 488 bp, Homo sapiens
tttcctttttggtacttattactgctaagtatttcccagcacatgaaaccttattttttcccaaagccagaaccagatgagtaaaggagtaagaaccttgcctgaacatccttccttcccacccatcgctgtgtgttagttcccaacatcgaatgtgtacaacttaagttggtcctttacactcaggctttcactatttcctttaaaatgaggatgattattttcaaggccctcagcatatttgtatagttgcttgcctgatataaatgcaatattaatgcctttaaagtatgaatctatgccaaagatcacttgttgttttactaaagaaagattacttagaggaaataagaaaaatcatgtttgctctcccggttcttccagtggtttgagacactggtttacactttatgccggatgtgcttttctccaatatcagtgctcgagacacagtgaagcaaattaaaaaaaaaaaaaaaaaatccctg

SEQ ID NO: 1054 - DNA, 204 bp, Homo sapiens
aaaggagatttacttttactgcagctcttcttgcccatcaactgtccaaaaacaaaagactaggaaacagacccagcagcctccacccgacccagccacagggcctcaagcctccaatcagagccgctccatggcacccctcagctcagctcagtgttgcctgggagcaaaaggctcggagacaaagcccagagggtgagcagg

SEQ ID NO: 1055 - DNA, 528 bp, Homo sapiens
  misc_feature (1)...(528): n = A,T,C or G
ctgttatttatgtggctcatgatgcttattgagcaatctgcaaaaatagatttcctgtctcacacaggacagggtagatttccagcaagcataatcaaaatctccaagtcttttggtcaaattagagctgccaccatgcacgaggttttacttaaaggtgtttactgatgaataaactcacacttctgtgaactggttcttgcttcttgtgcagctaactctttccacctctctttgttctgctgaatgatgtccaccaggttgttcttgaaactcttcaggtccactgctgcaagggagtagtctggggaataggacccatcactcatggagccttttgtatttgatcgtcttaatgcatcagcaatgtgtaaccccccaatggtggttgagctgcttgccacataagaaagaagtttcggtttttgangcttnctctataagaagaataacaattttctctgttgagtctgcaaaaaaaaaaaatgttggcaccttncccggcnggccgttcaagggcgaattnca

SEQ ID NO: 1056 - DNA, 418 bp, Homo sapiens
  misc_feature (1)...(418): n = A,T,C or G
ccaccgggatagccgggggtctggcaggaatgggaggcatccagaacgagaaggagaccatgcaaagcctgaacgaccgcctggcctcttacctggacagagtgaggagcctggagaccgagaaccggaggctggagagcaaaatccgggagcacttggagaagaagggaccccaggtcagagactggagccattacttcaagatcatcgaggacctgagggctcagatcttcgcaaatactgtggacaatgcccgcatcgttctgcagattgacgatgcccgtcttgctgctgatgactttagagtcaagtatgagacagagctggacctgcccgggcggccaagggcgaattcancacacttggcgccgttctagtggatccagctcgtccaacttgcgtaatcatggcatactgt

SEQ ID NO: 1057 - DNA, 281 bp, Homo sapiens
  misc_feature (1)...(281): n = A,T,C or G
gattgtgtgtntgtatgtttaatataacatgacatgcactaggacntctgcctttttaaggcagttccgttaagggtttttgtttttaaacttttttttgccatccatcctgtgcaatatgccgtgtagaatatttgtcttaaaattcaaggccacaaaaacaatgtttgggggaaaaaaagaaaaaatcatgccagctaatcatgtcaagttcactgcctgtcagattgttgatatataccttctgtaaataactttttttgagaaggaaataaaatcag

SEQ ID NO: 1058 - DNA, 456 bp, Homo sapiens
  misc_feature (1)...(456): n = A,T,C or G
ccctggtccccctggccctcctggacctccaggtgtaagcggtggtggttatgactttggttacgatggagacttctacagggctgaccagcctcgctcagcaccttctctcanacccaaggactatgaagttgatgctactctgaagtctctcaacaaccagattgagacccttcttactcctgaaggctctanaaagaacccagctcgcacatgccgtgacttgagactcagccacccatantggagcagtggttactactggattgaccctaaccaaggatgcactatggatgctatcaaagtatactgtgatttctctctggcgaaacntgtatccnggcccaacctgaaaacatcccanccaagaactgggtattangaagcttncaagggacaagaaaacacttcctggcttaggagaaaactatnaatgnttgnaatcantttcaatat

SEQ ID NO: 1059 - DNA, 365 bp, Homo sapiens
ccagaagggaagtcatccacaaagacctggctgccaggaactgtgtcattgatgacacacttcaagttaagatcacagacaatgccctctccagagacttgttccccatggactatcactgtctgggggacaatgaaaacaggccagttcgttggatggctcttgaaagtctggttaataacgagttctctagcgctagtgatgtgtggacctttggagtgacgctgtgggaactcatgactctgggccagactccctacgtggacattgaccccttcgagatggccgcatacctgaaagatggttaccgaatagcccagccaatcaactgtcctgatgaattatttgctgtgatggcctgttgc

SEQ ID NO: 1060 - DNA, 281 bp, Homo sapiens
cgcgagcgaacgaccaagagggtgctcgactgctagagccgagcgaagcgatgcctaaatcaaaggaacttgtttcttcaagctcttctggcagtgattctgacagtgaggttgacaaaaagttaaagaggaaaaagcaagttgctccagaaaaacctgtaaagaaacaaaagacaggtgagacttcgagagccctgtcatcttctaaacagagcagcagcagcagagatgataacatgtttcagattgggaaaatgaggtacgttagtgttcgcgatttt

SEQ ID NO: 1061 - DNA, 82 bp, Homo sapiens
ccacaggtgatcctcccacctttgtctcccaaagtgttgaggtaaaaggcatgagccaccacactcggccaatctaattttt

SEQ ID NO: 1062 - DNA, 613 bp, Homo sapiens
  misc_feature (1)...(613): n = A,T,C or G
gttgaatagatgggggatccagagccaactcaggcccccctactcccaaatgtcatcaaacagattgaattcctaagggcagatgggagcaatgggacgccttgacctctcagtctcttcacttgcagtcatcatgtggaaccgtggcctgtaccaaaacagtacctgatgaaagctgccattacagtatacaactgcaccccaggcctgcctcataccaaatcattctccttcctttccaggtacgagtgcttccatatccatttacccaccattggcaatttgaaaggaccatccagacccccataggatccacatggaacacccagagggctttccaaaagctgactactcccaangtcgtcaccaagccaggccatatcattaaccccataaaagcagaagacgtgggctacccggtcttcctcaaggtcnggacctgtctgtcatacagaaggaattccaaaacnaaatcacccacaccgtcacnaaaaaacaaaccttcccngggcgggccgcttccaaangggcgaaatttccancacactttngggggccgttacttanngggatnccaacttcggnncccnaaccttgggggtaaatnattggg

SEQ ID NO: 1063 - DNA, 173 bp, Homo sapiens
  misc_feature (1)...(173): n = A,T,C or G
gagaattacttcaaattgagtaattcagaaaaactcaagatttaagttaaaaagtggtttggacttgggaacaggactttatacctcttttactgtaacaagtactcattaaaggaaattgaatcaaaaaaaaaaaaaaaaaaaaaaaaaaaaaangcccccncccngggggg

SEQ ID NO: 1064 - DNA, 379 bp, Homo sapiens
  misc_feature (1)...(379): n = A,T,C or G
ccagcaggcgcatgaaggcaagttgggtagccatttccttggaagtcactccttctacattatattcaaactggctgccagcattgatagtttctcctagccagacgtgtttcttgtccttggagctcctataccagttcttggctgggatgttttcaggttgggcccggatacaggtttcgccagtagagaaatcacggtatactttgatagcatccatagtgcatccttggttagggtcaatccagtagtaaccactgctccactctgggtggctgagtctcaagtcacggcatgtgcgagctgggttctttctagagccttcaggagtaagaagggtctcaatctggttgttgagagacttcagagtancatcaac

SEQ ID NO: 1065 - DNA, 280 bp, Homo sapiens
  misc_feature (1)...(280): n = A,T,C or G
atcagaattgttgacttgcattcagaacataaatgcacaaaatctgtacatgtctcccatcagaaagattcattggcatgccacaggggattctcctccttcatcctgtaaaggtcaacaataaaaaccaaattatggggctgcttttgtcacactagcatagagaatgtgttgaaatttaactttgtaagcttgtatgtggttgttgatcttttttttccttacagacacccataataaaatatcatagtnaaaaaaaaaaaaaaaaaaaaaaaaaaaa

SEQ ID NO: 1066 - DNA, 599 bp, Homo sapiens
  misc_feature (1)...(599): n = A,T,C or G
aaaggctttttattaggaaccaggggaatgagctgcttatccctctataacagtctagagcaggtcatcaggcccaggatggagagaggttatcaaaggtgctgtggtgtgctttgctgcacgtgcttagggcctggaaggaaaggtggtggcaacagaggttggcaggaactggtgttagtcaaaacaccaaaatcctgggggagagcccctctaccttccttctaactccacttgaggtgggagcattccaggagacagagaatgtgaccaggatgcagcagtgtcatctgaacccctggcttcgttcagtgctacttcacttgccagccctccactcttcttgccttttagtgattaggtatttgaagaactcatacacagaccatgcnatggctgtggaggggatctggtaaattactctggctgcccctcggaaatangcggcccccnctcttgatatncgcctgaagnactaccatcctgtattgctgtatgtgtagtcaaaccagactctgggtgacatgtttgaactccangggtgggtgggantcactctccactcaaagactgactggtnncnttgggtaancctcgat

SEQ ID NO: 1067 - DNA, 138 bp, Homo sapiens
aaaaagtcttctccagtcttccaactgtgagtccttgggcctgttgacaaatgttaaacacactgagacgtcctgaactggatggtagagtcaaaggaaaaacattccccatttgcaacaaaggagaaacccacttgg

SEQ ID NO: 1068 - DNA, 304 bp, Homo sapiens
aaaattcagcaaaatcatacgccatctaccgtgatgactgccaactccatggcagaccctttctgggattcaaaaaccaattcatcagatcgctgcctctgagggatgtacagattggctggggagctgagtgctacaataaaggaggaagtaccggggaacagtgcagggcaaaggcaggaaagagatctgagctgcctggagatcatctggggtgcggagtacaaagctttgcaagggtgtggttttggaatgacgctaaactgaaggtggagagaacagataaaaaggttggaagttgcac

SEQ ID NO: 1069 - DNA, 375 bp, Homo sapiens
ctgcatatacaattttctaaaagaaaatcctaaaggtgggttcttattgtatatggaacagtgaccccaagtggatttgcacaacccttgccagagaagttcatcattcgcaaggtcctgccaaacacatgaagccaagcaaaggtcagttgcattcaggtaggacaagatggtaaagcttagctcaggaggcaacatttccaaattaatgaatccttcctgttctttcgatttccttgccttcaaaagatgatatatgtcaatgcctccttggacttgtttacgatgattggtgttagaaatgttgctcgcagccattctcctgctctgctctctggtgaggtagccttgctcactgtagccttcttgttgcag

SEQ ID NO: 1070 - DNA, 140 bp, Homo sapiens
ggggtttggtttgctttggtttatattttttcagttgtttgtttttgcttgttatattaagcagaaatcctgcaatgaaaggtactatatttgctagactctagacaagatattgtacataaaagaatttttttgtcttt

SEQ ID NO: 1071 - DNA, 366 bp, Homo sapiens
ctgaaacaaattatggatcaattacgaaatctcatctgggatataaatgccatgttggcaatgaggaactaagctgatatttaaatttcctgctttacacatgttataccattgttttttccctcaagtattttttccctgtgaagaagattatttatctgcttttattttagtcactaaaactaaagtttttatttttacattgtgatttttacattaaaatattaactttttttaatgctattttatgaaagattattgtaataaactttgatggggtttgtattttggttaatcttcatgaattgaataattgtttttttaaagcaaaataaagttttttaaataaatggaaaaaaaaaaaaa

SEQ ID NO: 1072 - DNA, 704 bp, Homo sapiens
  misc_feature (1)...(704): n = A,T,C or G
cagaattctagaaatttggcagacagtggaagcctttaattgaacttactccttcgttgactgaaaggagttttaaattctgagctcctgagatactgactagcaaccatggaatgaatgtgtgaccagaaagtggctttgacaccaagtgctactgtccctttgtaattggcttctaacagattcaaccagaaataattgataatgtgaatttttgttaattgttcacttgtaggaaaatagaacatgtatcaccctttgttaggtagacatgaacttttcctgcataaagccttgcttttagagaatgcccaataaggcaagaaaaagcatagtaacttgtgctttgagagctcaatatttgtatcttatcagtacagaagaaatatttctgngtaacttgatcttctgctangacttgncttatagggnaccaacactgaaaacttttgtagtgatgactaccaaagaaaatccttgtaaaacaccctttntttccaattngtaaaaanccancccntggtgcttgttcatgaattccttctcaanaancctttggaanaaaattaagggggttctangggttttggggaantttnggtngggtttttcttttgntttttangggtttttttnnttntttaantttngaanaaaaaataacccaaaaacttnggngnggaccccttaagggngaattcccc

SEQ ID NO: 1073 - DNA, 628 bp, Homo sapiens
  misc_feature (1)...(628): n = A,T,C or G
aaattttagaaaacctgtataaattactggtgcataacttaaagattattctgcctttggctaattgagtaattcccctccagcactagagaccgctcagtgctcttactagatgaactcagtaacgccttgagctgggttgattgaggatgtgtgaaaagctcacagagcccgatgcctgctgctatttcacggcaatgagcctttttctttctacactgaagattttcttcttatttaatgtggtttattttgggctcagaaataattgctctgttgaaaataatcctttgtcagaaaagaaggtagctaccacatcattttgaaaggaccatgagcaactataagcaaagccataagaagtggtttgatcgatatattaggggtagctcttgattttgttaacattaaaataangngacttttcccctgcttttangaataaaatcaaagatacttctatattttatcctatagacatantattataaatgtagtgagtctgctgggactcntgngnaagaacctgaatatagatatagaaacantatttntaactggtgcggatcaanagactaatatanaacttnnttggaaatnactcttttaancttttttgaacngggga

SEQ ID NO: 1074 - DNA, 162 bp, Homo sapiens; identical to SEQ ID NO: 970

SEQ ID NO: 1075 - DNA, 157 bp, Homo sapiens
ctgcaaaccagggaggaaaatcatctggcccctgctctgaggacagacatgtgctaccaggcccactggcctggacctgaaaggccagccacgcccccgcttggccctgaggtgcatggggtgtggcacacaccctaacctgtgctattcaccttgg

SEQ ID NO: 1076 - DNA, 293 bp, Homo sapiens
aaatgtaggtggcgtatgtgttcgtgttttaatgtattcagagccattgggcaataagcagtccagaacattgaaaactcaagcaggtaaagcacctaacacccttagtttctagaattactttaaaaaacttttatattgctgcatcttccacagttctttgggtagtctctgaacttaaaatttgtaggagttgtagactacctaaatttttaagttatggtatttgttcataggttgtaggggtaggtaaagaaggaaacagacaagaaaatggcttcttgaggtggcag

SEQ ID NO: 1077 - DNA, 587 bp, Homo sapiens
  misc_feature (1)...(587): n = A,T,C or G
aaagntattttagtcatgaaattttatatgcagagagaaaaagttaccgagacagaaaacaaatctaagggaaaggaatattatgggattaagctgagcaagcaattctggtggaaagtcaaacctgtcagtgctccacaccagggctgtggtcctcccagacatgcataggaatggccacaggtttacactgccttcccagcaattataagcacaccagattcagggagactgaccaccaagggatagtgtaaaaggacattttcccagggctaccttatcaaggacggcaagctgatcaagaacaatgcctccactgactatgacctatctgacaagagcatcaaccctctgggtggctttgtccactatggtgaagtgaccaatgactttgtcatgctgaaaaggctgtgtggtgggaaccaanaagcgggtgctcaccctncgcaagtccttgtggtgcagacnaagcggcaggctctggaaaaaatgancttagttcttgaacccctccagttgactgccggcggcntcaaaggcaatcaccacntgcgcgtctanggancactngncactggnatatgcta

SEQ ID NO: 1078 - DNA, 377 bp, Homo sapiens
ccaggagatagagcacaataggagagatgctgaggaacttgcgggaagaggtaaactggagcccatagtccatttgctcccagtgtgtcagtagccgagcctttccttggtcaggagtctcaaagggtgtccctttcaccgtatgaaggaagacatacgtagccaggttatggatgacgttggtcagggtccagacaacaggaatgctgaagaaggggatgctgagtagaaccatatgcagcaatcctaccaagatgatgtaggccagccagatgcctcggctattcatcactcgggtgttggggtttacttcgctgtgtgccacccccacattcatcctgccagctcagatccccgtccggctatgggcgcggcgc

SEQ ID NO: 1079 - DNA, 312 bp, Homo sapiens
atcagacaaggcaaagcgaaattggtcattctcgctaacaactgcccagctttgaggaaatctgaaatagagtactatgctatgttggctaaaactggtgtccatcactacagtggcaataatattgaactgggcacagcatgcggaaaatactacagagtgtgcacactggctatcattgatccaggtgactctgacatcattagaagcatgccagaacagactggtgaaaagtaaaccttttcacctacaaaatttcacctgcaaaccttaaacctgcaaaattttcctttaataaaatttgcttgtttt

SEQ ID NO: 1080 - DNA, 307 bp, Homo sapiens
aaacttgatccaacctctttgcatcttacaaagttaaacagctaaaagaagtaaaataagaaggcaatgcttgtggaatgtacagtgcatattggcggcgcacgcctcattacgattcgcctgcttgcttctcctgttcaatcgtttctttggaaggcagtggatttttctcttgcgtctctgtcttcttcagtttcgacttatcgaatttctcgatctcagccatatcgggtttgtcagacatggttgcggaggaaaagcgaagcgaggcgcacgagtacgagcgaagtctggtctgcgcagtggc

SEQ ID NO: 1081 - DNA, 317 bp, Homo sapiens
aaaaacaaaaacccttaacggaactgccttaaaaaggcagacgtcctagtgcctgtcatgttatattaaacatacatacacacaatctttttgcttattataatacagacttaaatgtacaaagatgttttccacttttttcaatttttaaacacaacagctataaacctgaacacatatgctatcatcatgccataagactaaaacaattatatttagcgacaagtagaaaggattaaatagtcaaatacaagaatgaaaaacgcagtacatagtgtcgcgaactcaaatcggcatttagatagatccagtggttt

SEQ ID NO: 1082 - DNA, 422 bp, Homo sapiens
  misc_feature (1)...(422): n = A,T,C or G
gggcggcggcgcggttttttatggtgacacaaatgtatattttgctaacagcaattccaggctcagtattgtgaccgcggagccacaggggaccccacgcacattccgttgccttacccgatggcttgtgacgcggagagaaccgattaaaaccgtttgagaaactcctcccttgtctagccctgtgttcgctgtggacgctgtagaggcaggttggctgtggcgagtccgtcctttctttattctggcaggctttggtttggggatgtactgattatttgcctggtactcgagttctttacggaagtagtgaattgctttgtttacctgcccgggcggccgctcnaaagggcgaattcancacactttggcgcgtactantggatccnactcggaccaacttgcgtaatcatggcatactg

SEQ ID NO: 1083 - DNA, 162 bp, Homo sapiens
ctgctgcattagccttcaaaagtatttggaaacttaagatgaactacatttcttgcaaagtacattcctttctgtggtattttgtcctgtaactgaagtatagtaattattttatggaaatgttagcaattctgtaccaactttgaataaaatgaaaaattt

SEQ ID NO: 1084 - DNA, 579 bp, Homo sapiens
  misc_feature (1)...(579): n = A,T,C or G
aaagttattttagtcatgaaattttatatgcagagagaaaaagttaccgagacagaaaacaaatctaagggaaaggaatattatgggattaagctgagcaagcaattctggtggaaagtcaaacctgtcagtgctccacaccagggctgtggtcctcccagacatgcataggaatggccacaggtttacactgccttcccagcaattataagcacaccagattcagggagactgaccaccaagggatagtgtaaaaggacgttttcccagggctaccttatcaaggacggcaagctgatcaagaacaatgcctccactgactatgacctatctgacaagagcatcaaccctctgggtgggctttgtccactatggtgaagtgaccaatgactttgtcatgctgaaaggctgtgtggtgggaaccaanaaccggtgctcccctcccaagtccttntgngcaacaaacgcgggctctgagaanatgaccttagttcttgccccctcaattgactgcccggcgcgtcaggcaatcanccttnggcgtctangancacncgncacttgcgatatgctatgttt

SEQ ID NO: 1085 - DNA, 334 bp, Homo sapiens
aaaacttctccaatacattaaaactttttttctcgccacatagcacttctttcttgcctctttcatttctgctcctggtgttgcctgcctcctgcaagacccagatgaagaaaccttttcaatggtcgagatctgagacttggagctggaggggctgaaggcttgaaggaaggtggttactggtcaaaaggagaagttcatttgcacaaaaatataaactggggaggatgagaccagcacatacacgtatggattgatctacaatccatataaaaaaatagacccaaattgtcattttacatttgcaatattatacaaaataatatatattttt

SEQ ID NO: 1086 - DNA, 235 bp, Homo sapiens
aaagctggctcaagactggcccaggcataatactgtcaatctaaaggtaaccggcaacatcaaaaagtacatctcaaaagaatcaggcttaaagataaacaggagaactggaaatatctaagagtaagaagtgtaaacaatagaaaagaggtagggtttagggttctcatcttgggatttccccaggtcttcaagcttctatccttcctgggttctgggtcatgggcctccagat

SEQ ID NO: 1087 - DNA, 229 bp, Homo sapiens
gacaaagaagcgaaaagtagatggtttgagcacagaggcagagcagcccttcattccggtagaggtgctcgtagacctgttcctcaaggaaggtgcctgtgatgaattgttctcctacctcattgagaaagtgaagcgaaagaaaaatgtactacgcctgtgctgtaagaagctgaagatttttgcaatgcccatgcaggatatcaagatgatcctgaaaatggtgcag

SEQ ID NO: 1088 - DNA, 334 bp, Homo sapiens
  misc_feature (1)...(334): n = A,T,C or G
ccattacaaagacacnggaatatgttaagaagtgaggggcaggatgaaatcatctagggtaggtatttagagggagggcgccgtgcaaaataaaatcctcactatgaaacaaaggcggaggcaggaggctgcgttaggtggaagcagcggaggaaggagacgaaagggattgtcattttcatgtcgtggctttttagaagacagccatgtcctctactctgattctatcaaaatgtgttctcggggtgctggtaacgttcagccaacgaaataattcctatggcggcagtaggaataacaaaacgcggaagcgggaacgatgtctttttattcc

SEQ ID NO: 1089 - DNA, 573 bp, Homo sapiens
  misc_feature (1)...(573): n = A,T,C or G
ccagagcaggagggagacagaggggaggcaccacacactttgaagcaaccagatgtgatgaggactcaatatcaggagaacagcactgagcgggtggtgctaaaccgtttgtgaggactctgccccataatcccatcgcctcccaccagggggcttacatttcaacatgagactcggtgaggacacagatccaaaccacatcaatagtgctttcatgcttttgattatcttttgtaactatgttattgaactataatttacataccatacaattcaccaacgtaaagtgtgtaattcaatggtcttaagcatattcagagttgtgtgaccatcgctacagtcaattttaggacatttttatcactgcaaaagaaagacctcaatcttcccattccttccatcccgaaacaaccctaatctacttnctctatatnggagaatttgcttanttctggacattttaccttgccccngngggccgcttcaaagggcgaaattccaccacactttgnggccggtacttantggatcccaacntcggtacccaancttgggngtaaatcatgggcatta

SEQ ID NO: 1090 - DNA, 290 bp, Homo sapiens
cccagaccaggaattcggcttcgacgttggccctgtctgcttcctgtaaactccctccatcccaacctggctccctcccacccaaccaactttccccccaacccggaaacagacaagcaacccaaactgaaccccctcaaaagccaaaaaatgggagacaatttcacatggactttggaaaatatttttttcctttgcatttatctctcaaacttagtttttatctttgaccaaccgaacatgaccaaaaaccaaaagtgcattcaaccttacaaaaaaaaaaaaaaaaa

SEQ ID NO: 1091 - DNA, 282 bp, Homo sapiens
ccacatcggcagggtcggagccctggccgccatactcgaactggaatccatcggtcatgctctcgccgaaccagacatgcctcttgtccttggggttcttgctgatgtaccagttcttctgggccacactgggctgagtggggtacacgcaggtctcaccagtctccatgttgcagaagactttgatggcatccaggttgcagccttggttggggtcaatccagtactctccactcttccagtcagagtggcacatcttgaggtcacggcaggtgcgggcgg

SEQ ID NO: 1092 - DNA, 249 bp, Homo sapiens
ccaagttaatgaggtcacggccagagcggtggagaactcgactgcatagactagaccatccggaccaacgatgccagagacatgggagaccgtggtgcccgaggcagccccgaggtagagaaccttagcccccggtttgatgtggatctggtccacaccacccaggattgctgctgctagcttggagcggaaggggttccaggctcggtactcaattttgtcatctccttccgaaatcgagactctctt

SEQ ID NO: 1093 - DNA, 426 bp, Homo sapiens
  misc_feature (1)...(426): n = A,T,C or G
aaaaataagaaaatacataagaccataacagccaacaggtggcaggaccaggactatagcccaggtcctctgatacccagagcattacgtgagccaggtaatgagggactggaaccagggagaccgagcgctttctggaaaagaggagtttcgaggtagagtttgaaggaggtgagggatgtgaattgcctgcagagagaagcctgttttgttggaaggtttggtgtgtggagatgcagaggtaaaagtgtgagcagtgagttacagcgagaggcngagaaagatagacatgagggnaagggccatgcttnaagggaccttgaatgggtaaagaagtttgatatttaagnagttaanaatntntatntctccaaaagaggctggtnctttgggaccttcggttcttaccaccnttaanggcgaatt

SEQ ID NO: 1094 - DNA, 211 bp, Homo sapiens
aaacattgtctaagaaaatatgatctatgaagacattaatacattaataagatacttaagagttcattataagctacaacactttgcaaataagtatccagtttaattgtaacaaaccacaatttgtgagcaaatttaagaatataaaaaacattaattagttaaatacaattctctgggaatatacattatacctacagacctgcccggg

SEQ ID NO: 1095 - DNA, 437 bp, Homo sapiens
aaacatctcacatatacaaaataggtacaatttaatttttctgcttgcccaagaaacaaagcttctgtggaaccatggaagaagatgaaaatgagactggcaaagaacaaatgctgaatctgaagaagaggacaactttgggcaaataatctgcatacttttaattgggaataagatggaaaatatgaatgctaaatcaaattttttaaaaaatacaccacacgatacaactcaatacaggagtatttcttctcaaattcttctagcaccatcaacattcttcaagtatctgaaatactattaattagcacctttgtattatgaacaaaacaaaacaaggacctcagttcatctctgtctaggtcagcacctaacaatgtggatcacactcatggggaaagtgttttgaggtagtttacctcggcccgcgacccacg

SEQ ID NO: 1096 - DNA, 237 bp, Homo sapiens
caggtctttctttatataatcgtttgcattttgttacttgctaccctgagtactttcaggaagactgacttaaatattcggggtgagtaagtagttgggtataagatctgaacttttcatctgcagaggcaagaaaaatatttgacattgtgacttgactgtggaagatgatggttgcatgtttctagtttgtatatgtttccatctttgtgataagatgatttaataaatctcttt

SEQ ID NO: 1097 - DNA, 297 bp, Homo sapiens; identical to SEQ ID NO: 745

SEQ ID NO: 1098 - DNA, 543 bp, Homo sapiens
  misc_feature (1)...(543): n = A,T,C or G
ccaattgaaacaaacagttctgagaccgttcttccaccactgattaagagtggggtggcaggtattagggataatattcatttagccttctgagctttctgggcagacttggtgaccttgccagctccagcagccttcttgtccactgctttgatgacacccaccgcaactgtctgtctcatatcacgaacagcaaagcgacccaaaggtggatagtctgagaagctctcaacacacatgggcttgccaggaaccatatcaacaatggcagcatcaccagacttcaagaatttagggccatcttccagctttttaccagaacggcgatcaatcttttccttcagctcancaaacttgcatgcaatgtgagccgtgtggcaatccaatacagggggcatagccggcgcttatttggcctggatggttangataatcacctgacagtgaaccagactcggccgcgacccgctaagggcgaattccacacacttngcggccgttcttatggatccnactcggaccaacttggcgnaatatggcata

SEQ ID NO: 1099 - DNA, 142 bp, Homo sapiens
gcagaggctacgccgtctgcaggacaggtccctcgcccagcccatcaccactgaagaggtggtcatcgcggccacattgcaggccccctccacatcccgcttcgcctcccttcaggactccaccccggctcccggacgccag

SEQ ID NO: 1100 - DNA, 697 bp, Homo sapiens
  misc_feature (1)...(697): n = A,T,C or G
aaaatgtagcaaagagtcatttactactctcagaagtggcacatacatggcatagaaaacaatctatagtcagttaactattaaaacagaaacttgaaatttaagtgacaaacatttgtagcactccctaaagaaataggaaataaaaatgcatttatccatatgaacttgattattctgaattactgactataaaaaggctattgtgaaagatatcacactttgaaacagcaaatgaattttcaattttacatttaattataagaccacaataaaaagttgaacatgcgcatatctatgcatttcacagaagattagtaaaactgatggcaacttcagaattatttcatgaagggtacaaacagtctttaccacaattttcccatggtcttatccttcaaaataaaattccacacactatcaaactaaatcaagatttgctagtggataaaattaccataaatatcccgtactctctctgaaacagctacaaacatcttggtttttgcaaaaatatacaatggtttctcaatctttctggnccttatctcaatttggcaaaaaatanttttgnaaacaaatcttccttttaaanggtaattcttggtaaaagaagggcnaaatctttttaaaatnccccatgcttaaaatnttgaccttgcccggggcgggccgntttaaagggggaaattccaaa

SEQ ID NO: 1101 - DNA, 477 bp, Homo sapiens
  misc_feature (1)...(477): n = A,T,C or G
aaatctcagacctgggaaatggactatacacagccttctaggggagaagagaaatgccttagatgttctgacagcactgcacctttggcttgttttcagtggttggtggaacatgaataggaaccacattgttgcttggagacatgtcattttcgcgtctgtctgacatttgcttctgagaaacaatgcggtaaatctctgttaaaattgtctgaaaagcagcttctacatttgtagagtctagggccgaagtttcaatgaatgacaaaccattcttttctgcaaaagctcttgcttcatctgtaggaactgccctgagatgacgtagatcactcttattgcccacaagcatgacaacaatgttactatcancatgatctctcacctgccgggcggncgtcgaanggcgaattccaccnacttgccggccgtactaatggatccnactcggaccaaccttggcgtaatcatggcata

SEQ ID NO: 1102 - DNA, 229 bp, Homo sapiens
  misc_feature (1)...(229): n = A,T,C or G
gtttaatgtgttgtaagacgtagagtttatctcaagctgttaaaaatggtaatgtacaaatgtgaatagacacttatctatataatatgggtaagttttgtttcgcctataatagatgtttataaaaacaagtgaggggacagttggtctttttatcttttctttctttttctttcttttctttttttcttttttttttttttttttggncccccccgggtncccnttt

SEQ ID NO: 1103 - DNA, 185 bp, Homo sapiens
aaactactgaactgttacctaggttaacaaccctgttgagtatttgctgtttgtccagttcaggaatttttgttttgttttgtctatatgtgcggcttttcagaggaaatttaatcagtgtgacagaaaaaaaaatgttttatggtagcttttactttttatgaaaaaaaaattatttgcctttt

SEQ ID NO: 1104 - DNA, 258 bp, Homo sapiens
aaaacaggcacaagtgcaaacaattcacaaaaatttctagggaagatgcttttgttttgaaaactctgacccttaaaaaaaagtccttgcaatttctttgcccccaggtaggtcactagggagcagaagaatctaaaaatattatctagatagaaagggtccagacacctgaagttctttcctggaattccatctcacagcagccctgaagtggggcagggccgaggaggacaaggagacagcagtctgtggaggcag

SEQ ID NO: 1105 - DNA, 207 bp, Homo sapiens
aaacatctcacatatacaaaataggtacaatttaatttttctgcttgcccaagaaacaaagcttctgtggaaccatggaagaagatgaaaatgagactggcaaagaacaaatgctgaatctgaagaagaggacaactttgggcaaataatctgcatacttttaattgggaataagatggaaaatatgaatgctaaatcaaatttttt

SEQ ID NO: 1106 - DNA, 514 bp, Homo sapiens
  misc_feature (1)...(514): n = A,T,C or G
ccacccgttctgctggcctggatctccccactctaggggtcaggctccattaggatttgccccttcccatctcttcctacccaaccactcaaattaatctttctttacctgagaccagttgggagcactggagtgcagggaggagaggggaagggccagtctgggctgccgggttctagtctcctttgcactgagggccacactattaccatgagaagagggcctgtgggagcctgcaaactcactgctcaagaagacatggagacccctgccctgttgtgtatagatgcaagatatttatatatatttttggttgcaatattaaatacagacactaagttatagtatatctggacaagccaacttgtaaatacaccacctcactcctgttacttacctaaacagatataaatggctggtttttagaaacataaaaaaaaaaaaaaaaacttnggccgnaaccnccttanggggaaatccacccactggnggccnttactangggatccaactt

SEQ ID NO: 1107 - DNA, 346 bp, Homo sapiens
ctcgaatccccctagggctcaggcactgagggcctggggacagtggagcatatgggtgggagacagatggagggtaccctatttacaactgagtcagccaagccactgatgggaatatacagatttaggtgctaaaccgtttattttccacggatgagtcacaatctgaagaatcaaacttccatcctgaaaatctatatgtttcaaaaccacttgccatcctgttagattgccagttcctgggaccaggcctcagactgtgaagtatatatcctccagcattcagtccagggggagccacggaaaccatgttcttgcttaagccattaaagtcagagatggaaaa

SEQ ID NO: 1108 - DNA, 215 bp, Homo sapiens
  misc_feature (1)...(215): n = A,T,C or G
ctgtggaggagggtttcagaggagagaggtcggagagcagaggcctgagaagccagaggcaggtggagagagggtggaaagtgagcagcgggctgggctggagccgcacacgctctcctcccatgttaaatagcacctttagaaaaattcacaagtccccatccacaaaaaaaaaaaaaaaaaaaaanttttcggggantaaaantaanttttaa

SEQ ID NO: 1109 - DNA, 273 bp, Homo sapiens
aagcaagatgggtaagggctcaggaagttgctccaagaacagtagctgatgaagctgcccagaagtgccttggctccagccctgtaccccttggtactgcctctgaacactctggtttccccacccaactgcggctaagtctctttttcccttggatcagccaagcgaaacttggagctttgacaaggaactttcctaagaaaccgctgataaccaggacaaaacacaaccaagggtacacgcaggcatgcacgggtttcctgcccagcgacg

SEQ ID NO: 1110 - DNA, 304 bp, Homo sapiens
ccaagcacttcaaacctcatgggttctccagcgacaaggctaaggcgggctcctccgaatggctggctgtggatgggttggtcagtccctccaacaacagcaaggaggatgccttctccgggacagattggatgttggagaaaatggatttgaaggagttcgacttggatgccctgttgggtatagatgacctggaaaccatgccagatgaccttctgaccacgttggatgacacttgtgatctctttgcccccctagtccaggagactaataagcagcccccccagacggtgaacccaattgg

SEQ ID NO: 1111 - DNA, 104 bp, Homo sapiens
ctgcttctgcatttctcttcctaaatttcattgtgttgatttctttccttcccaataggtgatcttaattactttcagaatattttcaaaatagatatattttt

SEQ ID NO: 1112 - DNA, 374 bp, Homo sapiens
ctggcatgaagaaggaatagagcatggacacgccctgggacagcatggtgatctctaatttgtgctctgtcttaaaatagtcgaggaactgtttgagggtcatctcctcaccattaggctgcagcccttgtacctcaaagcgatcccacaatgtccactcttggttatagtactggtgacgtggtgcggcaaggggttcagagaaaccaaagaaaggcagggccaagttgaggaaaccattcttgtaggagtcaagctgtcggtgcccctgcacaaccttgtacagctccagacacacaaggccaaccacggctgctgtggtcgtggcaatggctgggatgatcttccctgcaatcagcttgctcttgtgcccg

SEQ ID NO: 1113 - DNA, 143 bp, Homo sapiens
  misc_feature (1)...(143): n = A,T,C or G
ctggcacctgcctcccaggccattctgacgtgtaaccgcatataggagcccactggctgagtagctaccatcatcgctggtggggaaactggtggtaggggtgtgagggtaagtgggggtgtcagcccgccangnggtcggaa

SEQ ID NO: 1114 - DNA, 335 bp, Homo sapiens
aaaagtccaacaactttttaatataaattacgactctcaaacccattcccatcactttattagtgatggtagcatacatattagagaaggtagctaaaggcaagagagcaccaaaggaaaaagactgtccaaagaacaggtattagaatgaggccgaagatcacggtgaccagagatttctaggagtctctaacctttccaccctatcctgttaaccctttagatctctagtataacactcaggctactgaggtattttagagcaacaagctgggttactttcagagcaaccagcttgactggaactgagagtaaattgggaatgtatgaccaat

SEQ ID NO: 1115 - DNA, 478 bp, Homo sapiens
  misc_feature (1)...(478): n = A,T,C or G
gactacctttggcccctgattcaagagaagattaaagttctggcagaagccgggctttctgagaccaatttttcagaaatgacagaatccactgattacctctacaaggacccaaagcagcagaagatctacgacctattccagaagtcctttgagaaagaaggaagtgatatggagctcctggaagcagcagagtcctttgacccaggaagtgcttcaggaacatctggaagtagttcccagaacatgggagacaccctggatgaaagctcattgacagccagtccacagaagaaaaggagatttgaattttttgataactgggacagctttcgtctccctgtaaaaggggcaaaaagaaaaaaataaaaaagcatttaccttgcccggcagccgctcaaggcgaattcagcacacttgnngccgtactagtggatccgacctgggaccancttggcggaaacatnggcataactgg

SEQ ID NO: 1116 - DNA, 563 bp, Homo sapiens
  misc_feature (1)...(563): n = A,T,C or G
cgaggtaaaacaatttacctcagaattccaagttgaagttcccaaagtatattaaaaacttctcaaatcattaatttgaatcagatgttccaaatcaaaggaattaaatactctttttctgggccaattgataaatctgaaactattttgaaatagtattaagtgacagaaaagcaaaaatatatctttgccttgtcttgatattttagcatgtacatttttggtccaaggctggaatatacaattagaaataaaagccttcttcatcataaagcttaggatataaattattctgaggaatgaattccctaattacttttagttaattccagtgaaataagcaaacagccttggatattgaaaactgttctaaagtgtggtaataatcttctaagaatagcaaacataacagaattaactgagtatctgatgcctgagtattttgctgtgcctgacaatcattatttacctgcccnggcgggcgctcaagggcgaaatncaacacactttgcggccgttnctagtggaatccnaactcggtaccaaaccttgggggnaatcat

SEQ ID NO: 1117 - DNA, 324 bp, Homo sapiens
aaatttcttaatatgagaaaacaacaaggtaggttaggttcgtataacaaacaatacacgctctataaagtctcaggaatacccaaatgtgttctggtttggatatgaaagagggaccacttctagctggtgttggtaagcaagccaatgaggtgtgcagcaaacaaaacctgtcactaaaaacaactcaacaggccattatgagtatgagcccatcacagccaaaatcctcaactgtgaccggcaggaccagcaagggggggtgttgaaggggttatgaacagcaaccataaagaaaggaatctccaacagaagggacaatgg

SEQ ID NO: 1118 - DNA, 214 bp, Homo sapiens
tcttggggtctgtttctggtattttacaaaattgctaagtggaatgcatgaattgcattatgttctctggtaacacgtagagttcagacccttctgaactctgttgataataccacaccatgttctggacccatagctctggcatcctcaggggttgtgatccagctccatatattgtttaccttcaaagatacaattaaatggcttgattttt

SEQ ID NO: 1119 - DNA, 354 bp, Homo sapiens
aaaaaactgaccttcccttaaggcctggtcatagaagtgtaaacaatgtaaatgaatccaccattaccagttgtcatatcatatctatgtcacctgtgtattctgagattacacacatacctgccaatatacctgggaaaggttattttatcacagttacacttgagttcttggcaggcaggactgaggaagagtaatttgaaagaagctttacatcctatttagaagaaatcactagtatttccttaaataacaggttacaatagaaagatactgcctggaagttatcctttcactttggttcatttttagtttttctttatgatttacatagctgtttaattcatttgctta

SEQ ID NO: 1120 - DNA, 123 bp, Homo sapiens
aaaactcgaggactgtatttgtgactaattgtataacaggttattttagtttctgttctgtggaaagtgtaaagcattccaacaaagggttttaatgtagatttttttttttttgccccccat

SEQ ID NO: 1121 - DNA, 433 bp, Homo sapiens
  misc_feature (1)...(433): n = A,T,C or G
cctcgagggagattgccagcaccctgatggagagtgagatgatggagatcttgtcagtgctagctaagggtgaccacagccctgtcacaagggctgctgcagcctgcctggacaaagcagtggaatatgggcttatccaacccaaccaagatggagagtgagggggttgtccctgggcccaaggctcatgcacacgctacctattgtggcacgggagagtaaggacggaagcggntttggctggtggtggctggcatgcccaatactcttgcccatcctcgcttgctgccctaggatgtcctcttgttctgagtcagcgggccacgttcaatcacacagcccttgnttggacctcggnccgcnaccacncttaaggggcgaaatttccancacacttggcggncgnttcttaagnggaatcccaaacttcggg

SEQ ID NO: 1122 - DNA, 576 bp, Homo sapiens
  misc_feature (1)...(576): n = A,T,C or G
aaatgttttacttctttgataaagcagagtacaatagaaaaaaaacaattagtttccagtaatatctatatctctaatcagaattaagtcttccaagacatattacctggaaataaaagcctgttacaataagcaaagcttcaaccagagcggctacttttcgtgccaggaaaaagttcatccctataggaggaatgatgtgctatgtaaaatggctgtaaggtcacagccttgagggcattggaagtatattatcctattccacattaagtatttcagcgaatttcaaacatcagtttatctgcaaccatgctggcaacctttactgatatttcaatcaaccgggaaaaaataaattaaagaaatcccttcacggatattcccgtgatttacactgttaaaaggtgcactgttcattaacatgtaattctggtcagaattacctttgagactncttgtcaaaatttggttaacagtaanaatcttcnnaaattcagttcttataatcaataatttgtcagcttaggatcccctgcccggcggcctncaaagggnaaattcccnccttnggggcgt

SEQ ID NO: 1123 - DNA, 371 bp, Homo sapiens
  misc_feature (1)...(371): n = A,T,C or G
gaaagaagtccctaagtgtggatttctccctgggaatgagaaagtcctgtccctgcttgccctggttaagccagaagtctggactctcaaagagaaatgcattctggtgattacatggatccaacacctgatccccaagattgaagatggaaatgattttggggtagcaatccaggagaaggtgctggagagggtgaatgccgtcaagaccaaagtggaagctttccagacaaccatttccaagtacttctcagaacgtgggatgctgtggacctgcccgcgcggccgctcaaanggcgaattncagcacacttggcggnccgtctantgggatnccaactcggtccaagcttggcgtaatcatgggcata

SEQ ID NO: 1124 - DNA, 264 bp, Homo sapiens
aaaaaaaaatgtggaggaaagtagaaatttaccaaggttgttggcccagggcgttaaattcacagatttttttaacgagaaaaacacacagaagaagctacctcaggtgtttttacctcagcaccttgctcttgtgtttcccttagagattttgtaaagctgatagttggagcatttttttatttttttaataaaaatgagttggaaaaaaaataagatatcaactgccagcctggagaaggtgacagtccaagtgtgcaacag

SEQ ID NO: 1125 - DNA, 214 bp, Homo sapiens
ttttcagagctagctgaggttttattttggaccaaaaaaaagcaattgaattgttttgtagctggaggcatgggcaaggggggtccccaggtagtaaactccccaggtgggctgagggctagggctgagcctcaggtgggtctcctgttcccagtgctaccctgcatagcggcctccttcccaggctctggggcagcgcaggaggggtaggctg

SEQ ID NO: 1126 - DNA, 119 bp, Homo sapiens
gggaaaagtaactcgggcccatggaaacagtggcatggttcgtgccaaattccgaagcaatcttcctgctaaggccattggacacagaatccgagtgatgctgtacccctcaaggattt

SEQ ID NO: 1127 - DNA, 214 bp, Homo sapiens
  misc_feature (1)...(214): n = A,T,C or G
tgcccgtgcnggtgccattgccccatgtgaagtcactgtgccagcccaaaacactggtctcgggcccganaagacctcctttttccaggctttaggtatcaccactaaaatctccaggggcaccattgaaatcctgagtgatgtgcanaccttggcgnnaccacnctaagggcgaatttcaacacactggggggcgtactngnggataccaaat

SEQ ID NO: 1128 - DNA, 591 bp, Homo sapiens
  misc_feature (1)...(591): n = A,T,C or G
tganntcagacccgnggatcctctanagtcacctgcnngcatgcnatgcttgaagcggccgncagtgtgatggatatctgcagaattcgcccttagnggggtcgcggccgaggtgtacggnctgnggtacaagcagactctgaagatgatcagacaaggcaaagcgaaattggtcattctcgctaacaactgcccagctttgaggaaatctgaaatagagtattatgctatgttggctaaaactggtgtccatcactacagtggcaataatattgaactgggcacagcatgcggaaaatactacagagngtgcacactggctatcattgatccangtgactctgacatcattagaagcatccanaacagactggtgaaaagtaaaccttttcacctacaaaattcacctgcaaaccttaaacctgcaaaattttcctttaataaaantttgcttgttttacctgcccnggcgggcccccgggcagggtgttttgttaaaaaaaaattctgacaaatcanaaaatggggggtcaaggantggtgntgatncnaaaaatggaanccattgggtgggggcttntcnggggtgcc

SEQ ID NO: 1129 - DNA, 287 bp, Homo sapiens
aaaaagattgtgtgtatgtatgtttaatataacatgacaggcactaggacgtctgcctttttaaggcagttccgttaagggtttttgtttttaaacttttttttgccatccatcctgtgcaatatgccgtgtagaatatttgtcttaaaattcaaggccacaaaaacaatgtttgggggaaaaaaaagaaaaaatcatgccagctaatcatgtcaagttcactgcctgtcagattgttgatatataccttctgtaaataactttttttgagaaggaaataaaatcag

SEQ ID NO: 1130 - DNA, 131 bp, Homo sapiens
caggtccacagctaacatcattgcagcacctttactccttcggctgtgatccaatctccagctcacttctttttgccagcaccaacattggcctttgcagtccccctgactttcttcattctgttcttgcg

SEQ ID NO: 1131 - DNA, 576 bp, Homo sapiens
  misc_feature (1)...(576): n = A,T,C or G
aaacatgcaaaataactgacaataatgttgcacttgtttactaaagatataagttgttccatgggtgtacacgtagacagacacacatacacccaaattattgcattaagaatcctggagcagaccatagctgaagctgttattttcagtcaggaagactacctgtcatgaaggtataaaataatttagaagtgaatgtttttctgtaccatctatgtgcaattatactctaaattccactacactacattaaagtaaatggacattccagaatatagatgtgattatagtcttaaactaattattattaaaccaatgattgctgaaaatcagtgatgcatttgttatagagtataactcatcgtttacagtatgttttagttggcagtatcatacctanatggtgaataacatattcccagtaaatttatatagcantgaagaattcatgccttctggtggacatttataagtgcattttatntacaataaaaatttttcttttagaaaaaaacctcggcgggacccctangggaatcaacccttgggcgtctanggacactnggccactgggaa

SEQ ID NO: 1132 - DNA, 386 bp, Homo sapiens
aaattttatttcaaaagcttggatagcttcaatatccaggttgtggcaaaatcaggacacgtgtaaaataccttacaatacattagatccccaaaaggtaccaaaaagtacagtaaaattaacacttccgttacaggaaatgtatgacgcaaataatataaaattaaaaggtgaaaaaaaggtgacactggtttcctaagatacaatttactctttacaaccagggtccacaggtccaggctgcagagcggcagcaggaagcagagcctcccacctgcttctgggggacctggtaataaaaatcagcccatgatggcgccatggcctctcagacaccacacgctgcctaaacacctagagctctggaaatagtcaacaggagagtg

SEQ ID NO: 1133 - DNA, 281 bp, Homo sapiens
ggcaggtaaaaagatccaaatgtgactgagatcattccagcctgcactttttatttgtaggcagaaggaacgggataggttgaggggcatgacgggggctctcgccacctcttgtctgcacctctggaacaggtgggagccgaatcattcaagtcctacctggtcagactcccaaccacgctgaggcaggcccttacctggatggcctcatgggcctccctcttgaaaagaccctcactctgtttggaaaagatcccttagcagccataatcaggaaagag

SEQ ID NO: 1134 - DNA, 332 bp, Homo sapiens
ccagtgagcccatcccgttctctgatttgcagcaggtctccaggatagctgcttatgcctacagtgcactttctcagatccgtgtggacgcaaaagaggagctggttgtacagtttgggatcccatgaagagaggggtccttggacagctcttctcctctcttcatcccatctctaccccacccccttggcccccagcctcactgcggcttatacagtaccctaacctgctactaatcacagagaaaaatgtgaagaaggaggagaagaggaaggctagaagcctgagcaagtgagggtagaaccttttgggactggcctttgaagctctgg

SEQ ID NO: 1135 - DNA, 316 bp, Homo sapiens
ctgcccaatgggagaataagcagacctggctcagacatgaatcatgtgcttggtgtactgcagatgccaaactgcatccccacaacccaccacgtagacagcagacagggctggaagttgatttttaatgataaagtacaatgaagggagggcagaggggctaagcctagctgtctggggtgctgtggtggtggtagactggctacacaaactgttgctgctgctgctgcttcttggtggccgccttgctggcgaggtccttggccttctctgtagctgccagtgccgtctcctttgccttctccttggcttcctt

SEQ ID NO: 1136 - DNA, 385 bp, Homo sapiens
  misc_feature (1)...(385): n = A,T,C or G
ggatttcaaaatcaacaccgatgagattatgacttcactcaagtctgttaatggacaaatagaaagcctcattagtcctgatggttctcgtaaaaaccccgctagaaactgcagagacctgaaattctgccatcctgaactcaagagtggagaatactgggttgaccctaaccaaggatgcaaattggatgctatcaaggtattctgtaatatggaaactggggaaacatgcataagtgccaatcctttgaatgttccacggaaacactggtggacagattctagtgctgagaagaaacacgtttggtttggagagtccatggatggtggttttcagtttanctacggcaatcctgaacttcctgaagatgtccttgatgtgcag

SEQ ID NO: 1137 - DNA, 229 bp, Homo sapiens
cgcgagcctgagaagaggccccccaccgtggtgtccaatacattcactgccctgatcctctcgccgttgcttctgctcttcgctctgtggatccggattggtgccaatgtctccaacttcacttttgctcctagcacgattatatttcacctgggacatgctgctatgctgggactcatgtatgtctactggactcagctcaacatgttccagaccttgaagtacctgg

SEQ ID NO: 1138 - DNA, 232 bp, Homo sapiens
  misc_feature (1)...(232): n = A,T,C or G
aaaacccanacttccaaaggtttaaactacctcaaaacactttcccatgagtgtgatccacattgttaggtgctgacctagacagagatgaactgaggtccttgttttgttttgttcataatacaaaggtgctaattaatagtatttcagatacttgaagaatgttgatggtgctagaagaatttgagaagaaatactcctgtattgagttgtatcgtgtggtgtatttttt

SEQ ID NO: 1139 - DNA, 165 bp, Homo sapiens
cacaatactaatactgtaggaattggtgaggccttgacttaaaactttctttgtactgtgatttccttttgggtgtattttgctaagtgaaacttgttaaattttttgttaactaaatttttttcttaaaataaagactttttcacaatgagaaaaaaaaaaaag

SEQ ID NO: 1140 - DNA, 191 bp, Homo sapiens
aaaaaatggacttatctctattatacagagttataatataaaaatgatttaaaggctatatttttcagcatgtaggtagctacactgtaatcctgttgaagaaactttcctatttaagcttataggatgaaaatatataattaaagtcttctgatcatagcttgagaccatcaagggaatgtttagtttcc

SEQ ID NO: 1141 - DNA, 149 bp, Homo sapiens
aaaattaaaaatgttttattggctattgcctttaatagatttactacaataaaggaaaggaatatttttctcaaatgtgctaataagaaaaagacccaggaaactgaacgatattggacacagttttcagtgttttagacataaataaa

SEQ ID NO: 1142 - DNA, 485 bp, Homo sapiens
  misc_feature (1)...(485): n = A,T,C or G
gcccagagcctggctgcccatcatgtggccccacccaatcaagggaagaaggaggaatgctggactggaggcccctggagccagatggcaagagggtgacagcttcctttcctgtgtgtactctgtccagttcctttagaaaaaatggatgcccagaggactcccaaccctggcttggggtcaagaaaacagcccagcaagaattaaggggccttaagggcacttgggcttgttggttccatttgaaancccgactcttggcccttggccctttactttgctttcttctaacctcttctaaggccctcttccaantttggcacccttgttcccccaaccccttccacttcaanaaccttgccccngggggggcccgcttcgaaaangggccgaaatttccaaccaccactttggcgggccgnttacttagtgggaatcccgaacttcnggtacccaaacctttggngntaatcatngggnataag

SEQ ID NO: 1143 - DNA, 439 bp, Homo sapiens
  misc_feature (1)...(439): n = A,T,C or G
gtaagatggcctctgatttacactggttcaatttacaaattttcaactttatgataggtttatcagggtactaaatgcatttcaacttgatagtttcaacttatgataggtttaccaggatgtagtcccactgttgaggagcatctatttaggggttaattactttagtaataagtggaaagtaagataccttgagtaatgtttgcctataaaattgtcagcgtatttttacactattggctcaagaatgttataatgctaagggacataagttggcaaccacttggtttttggaaggactttcggtattgtattagaagtctgccctagctgttaaatttctgggtatttatcctaaggaattaattaaagagttaattgttcctttcttcagtgggccattgttttanatatttacctgccccgggcggcccgctcg

SEQ ID NO: 1144 - DNA, 263 bp, Homo sapiens
ccttggttacacaactccagcaaccgggccccaaatccactatctgtgcaatgcagcacatgcgcagcaatgctattaaactgctcttggagaaattccaggtttgtccggatgatgtccacacctggctgaacctgcaccaaggaaaaactctcccgcacatactcttctagccccgtgatcaatgtgtgggttgccatccggatgttactgggtgtgggctcctgaccacccaggtagtgctggtggaagaaggatcgcag

SEQ ID NO: 1145 - DNA, 286 bp, Homo sapiens
cgcggcggcaagatggcagtgcaaatatccaagaagaggaagtttgtcgctgatggcatcttcaaagctgaactgaatgagtttcttactcgggagctggctgaagatggctactctggagttgaggtgcgagttacaccaaccaggacagaaatcattatcttagccaccagaacacagaatgttcttggtgagaagggccggcggattcgggaactgactgctgtagttcagaagaggtttggctttccagagggcagtgtagagctttatgctgaaaaggtgg

SEQ ID NO: 1146 - DNA, 489 bp, Homo sapiens
  misc_feature (1)...(489): n = A,T,C or G
aaacttgcagagtgcaaacttgcaataattcattgtgccggttattcagaccctatattggtgcagacactttggcaagatatcatagagaaagaattgagtgacagtgtgacattgagctcctcggatagaatgcatgctcttagtctcaagattgttctccttggcaaaatttatgctggcacaccacgcttctttcctttagattttattggacaagttttagaaccagcanggttgtactttgaactgggatgggggcttctaatacaaaccatgaatgaaattngantanccttgctaaactnctanaagttattatcagtggtcnaatcaccggatcantcntgnacaaatnaaaacccctgcncnttggatggtaccngnttttggaaaaatggtggaaanccaccaattttcctcccggngcctncaaaggnnaatccnccctgggggcgtncttgggnnccaccnggccanctggggaaa

SEQ ID NO: 1147 - DNA, 544 bp, Homo sapiens
  misc_feature (1)...(544): n = A,T,C or G
ctttaattaaggcattggtcccaacggtgcacatagattaagggattttgcttccttctgaactagatcatttgttagaggcttcagaaaaagaaaattagcttgaaatctagtctgggaaattgggggcagggaatgaaaaagttggtctcttgtttctccacgatacacaggcttcccatctaaagtcatgcttaactaaaagggaaaaaaaatgaaccaagcaaaagtatatagagtagccgtgacatttgcattattttctagactttacatttgcctgcaacaggcataacatgaaactccagagggaatttggattgataggaatgttcacataaacaccagcagtggctaactgttacacaacattcaaagtattcgagagaactgctggagacagagagcgagggtccacagacacattagcaccatactgataggcatgcagcaggatgttcacctgccggcggccgcgaaggcgattcaaccactggcggccgtctatggatccactcgaccaacttgggnaatatggctactg

SEQ ID NO: 1148 - DNA, 397 bp, Homo sapiens
ctgggtaccattccgggtcatccgcagaaattcctcatagatggcaactctgtctactctccgagccagtggcgagaagttacacagggagtccaccccggtgtggtgcctgttggggacagacctgaatgttgaaacttgacagtcagaaaaataactcttgatgctgctgtttcggaagagttggttgagcgcatcctcaatattccttttgttcctctggtaattggtggtgcctggctgggctttgtcctgggaatatggtaggttggtgatggtgaaattcaggtagaagtgctgagtgctggagctgcttgttggttgataaactgatgactccatttctgtcacatggatgtccaccaactggtaggcggacccagccaatggaatgagg

SEQ ID NO: 1149 - DNA, 137 bp, Homo sapiens
ctgcagcttttcaccacattttcaattactgaattgcatgttttttttccaccttgataacttagggtcagtagaaagctatttacttacatgttatagtcaatataactatactaaatgcccatttgtaattgaag

SEQ ID NO: 1150 - DNA, 171 bp, Homo sapiens
ctggacccttacacacttcctaatggcagaatttggctgtttggcttcaactcctactttttccagcacgattccttttgcatgagaagcacctccaaaagggttggcctttagggctgtgcccaaatgagctttcttatactgtttatcatgccacttctggtctcgtcg

SEQ ID NO: 1151 - DNA, 112 bp, Homo sapiens
aaatccttgaggggtacagcatcactcggattctgtgtccaatggccttagcaggaagattgcttcggaatttggcacgaaccatgccactgtttccatgggcccgagttac

SEQ ID NO: 1152 - DNA, 140 bp, Homo sapiens
aaacttgatccaacctctttgcatcttacaaagttaaacagctaaaagaagtaaaataagaaggcaatgcttgtggaatgtacagtgcatattggcggcgcgcgcctcattacgattcgcctgcttgcttctcctgttca

SEQ ID NO: 1153 - DNA, 481 bp, Homo sapiens
  misc_feature (1)...(481): n = A,T,C or G
ctgacacagactangatcgagttctcccacggccttcctatcccgtctctaatttactctctgcttttccctggaatgtgcatgagaaataaaccttccaaacatttcaaaagtcgcactttcctcctttattacaacgatgcccatttttaacgacactctcggtggcccctgacagctacctggtgagatacacagcatattgtgcccattgaatgaagatacttctgacaatgaggctttctcgtgaaataaaggtttcccgtctcataaaactgaaaatctttggaaaganctgagtggaaatggcttttgaagaaggcagtgattcactaanntatttgaaaacttaaggtagtgaagggtagaaaaccaacccaaaacaatcaaggggggaccgactggccccttgacttttgntggcnaacnaaaanaaatntntaaancctggtantcncnaaacnaattaaaacnanccctc

SEQ ID NO: 1154 - DNA, 688 bp, Homo sapiens
  misc_feature (1)...(688): n = A,T,C or G
aaaatttttatttgaatgaaatcattgtaataatcattaaagtgatttgaaatagaatgatctctgtgaaaggaagtttatagcatcactatttataggagagaaagcagcagaggtatgcatccggaagtgaatataacattgtaaaatcagcccacattaaataccaaaaaagtaagaaccatcaaaatgcagcattatttacaggattaaaaagtgtgaacagtacagagttaaactttcttatgtgtgaattttgacctgctatgttgttagcaaaaagctttagtgtttgtataaaatgatgtgtacccttatcccaaccaccaccagatcaagacacaaactgacaatgattccttccttattttacagctttattactgatttccctctaaaaagagactcaagtgtggagctgactcatctatagattaaggaatcacaaagtaccatagtcacttaacaaatgcaaaaaaaaaaagcaatggtttacctttcacctgntgggggtntgtncaatctttccaaaaaagcatactgngcttcntgacctgatttttcacccntnaatttaaaaccaccctttaanctttgggtctttttncttcaaanaaagctttnntttncctgccgnaccctangggaatcccncctggggcgtctatggtccacncgnccactgggg

SEQ ID NO: 1155 - DNA, 410 bp, Homo sapiens
  misc_feature (1)...(410): n = A,T,C or G
ccaagagaatgcttatttaagtgttagacttccattctggcaaaatcttgccttatcagaagacattggaaagagggattccctttggtgtttggtcttctacttagaaaaacctattgcagttagtttatcttgtagtattcatctttgtattctgaagataaggtttgaattaaattgatacacacagaggggaaccgattttttctatccaatgtgaattataaatgagataatccacagttattcattgtggagttgttgagactatgaaagactcattgtctttgtattcagctcttaaatagtgtaactatatccccacctctgcttgctttctttccctcccctccaatgataaagaaaatgataaattttctgtgngcattcaattcttattttacctgccc

SEQ ID NO: 1156 - DNA, 358 bp, Homo sapiens
ccatggtcccagtggtagtgtctttatgctcataagcagtgagggcaactagaggtcactttcatcatcatctgctggtttcagcaggcttctccactgcaccctgttttgaccagatcctgctctgttcaatggggttgggaatggaaaataagtccttctggtctcctacctcatttccccatcagtgattatatactcctccttaatcttaaggggcttgcagaagggcggaggttcatcttctgtaactgcttcctgctgatgttatgggcatagaccctgcctagcactggagaggtaaaatccctggatacctgttctaaaaggctcaaaggtaggatgtctttatcttctg

SEQ ID NO: 1157 - DNA, 262 bp, Homo sapiens
ctgccaaggagaccctgttatgctgtggggactggctggggcatggcaggcggctccggcttcccacccttctgttctgagatgggggtggtgggcagtatctcatctttgggttccacaatgctcacgtggtcaggcaggggcttcttagggccaatcttaccagttgggtcccagggcagcatgatcttcaccttgatgcccagcacaccctgtctgagcaacacgtggcgcacagcagtgtcaacgtagtagttaacag

SEQ ID NO: 1158 - DNA, 325 bp, Homo sapiens
gtccgctgtggcgggaaagcggcccccagaaccgaccacaccgtggcaagaggacccagaacccgaggacgaaaacttgtatgagaagaacccagactcccatggttatgacaaggaccccgttttggacgtctggaacatgcgacttgtcttcttctttggcgtctccatcatcctggtccttggcagcacctttgtggcctatctgcctgactacaggatgaaagagtggtcccgccgcgaagctgagaggcttgtgaaataccgagaggccaatggccttcccatcatggaatccaactgcttcgaccccagcaagatccag

SEQ ID NO: 1159 - DNA, 255 bp, Homo sapiens
  misc_feature (1)...(255): n = A,T,C or G
aaaaacctggggaactttaggttatttatacaaagggaataaataggctgattttaatttggtaagttgatctttttattatgaatttggtaatagtataggtttattatttattcatctaattttatagtacaggttttgtaatgttacatgtgatgatatgagctcccaccttatatgggggaacatcttgggaatttgagatttaataagttttttttttttttttttttttagggntttnccggcancccc

SEQ ID NO: 1160 - DNA, 242 bp, Homo sapiens
  misc_feature (1)...(242): n = A,T,C or G
ttaaaatcctgattttggagacttaaaaccaggttaatggctaagaatgggtaacatgactcttgttggattgttattttttgtttgcaatggggaatttataagaagcatcaagtctctttcttaccaaagtcttgttaggtggtttatagttcttttggctaacaaatcattttggaaataaagattttttactacaaaaaaaaaaaaaaaaaaaaaaaaaaaaacccnncccngggggg

SEQ ID NO: 1161 - DNA, 213 bp, Homo sapiens
  misc_feature (1)...(213): n = A,T,C or G
aaatctagagtaaaaccaagctggcccaaggtgtcctgcaggctgtaatgcagtttaatcagagtgccattttttttttttgttcaaatgattttaattntngnaatgcncantttttttaatatgcaaataaaaagttnacctgcccgggcggccgntcaaaagggcaaattccancncactggcggccgttactagnggatccaanctcgg

SEQ ID NO: 1162 - DNA, 407 bp, Homo sapiens
  misc_feature (1)...(407): n = A,T,C or G
tcttccaggagattaatcnatgaaatttataagttttatcaacgtataaaatttttttcatcttctgggactcatagaatacaatctgtgtttctgaccagttgaggtagttaaaatagggagggcttttctaatttcgtatttgactatttcagaaagaaaggttatcttttactggtgagcacagtcattgctctgcagatgggctaggattcaaagaatataacacagtgttgttatcataaagagtgttgaaagtttatttattatacaccattgagacattttgaaattggaattggnaaaaaaataaaaacctgccccggcnggcccttcaaanggngaattncnacncccctgggcgccnncctangggaanccaacntnggncccaancttgggggaaa

SEQ ID NO: 1163 - DNA, 187 bp, Homo sapiens
gcaggaggcatgccaggaggaatgcctgggggatttcctggtggtggagctcctccctctggtggtgcttcctcagggcccaccattgaagaggttgattaagccaaccaagtgtagatgtagcattgttccacacatttaaaacatttgaaggacctaaattcgtagcaaattctgtggcagtttt

SEQ ID NO: 1164 - DNA, 312 bp, Homo sapiens
aaatgggccagaatctataaacagtgattgccgaaataatctagagatgacagtgcagagaaattatgttcagacaataatataaaaatttagaaaaggaagcactagaatttttaatgatctgaaataaatatttttcataaaatttaatgtattctttttttgtttgtttttgatacacagtcactctgtcacccaggctggagtgcagtggtgcaatctccactcactgcaacctccaccacttgggatcaagtgattctcccggctaatttttgtatttttagtagagacagggttttgccatgttgg

SEQ ID NO: 1165 - DNA, 322 bp, Homo sapiens
  misc_feature (1)...(322): n = A,T,C or G
aaaatcctgattttggagacttaaaaccaggttaatggctaanaatgggtaacatgactcttgttggattgttattttttgtttgcaatggggaatttataagaagcatcaagtctctttcttaccaaagtcttgttaggtggtttatagttcttttggctaacaaatcattttggaaataaagattttttactacaaaaatgaaatttgtttggacttccacttgagacagtaaagagagtattagacacccagtaaaaactgccatataaagaagttgtaattgtttgttgtgtatgtatttttttcaatgccaaaccag

SEQ ID NO: 1166 - DNA, 96 bp, Homo sapiens
gtgatacccaaaatccagtgccttccaccaagccaggatgaggaagtacagacaattggtcagatagaactgtgcctcactaagcaagaccagcag

SEQ ID NO: 1167 - DNA, 256 bp, Homo sapiens
  misc_feature (1)...(256): n = A,T,C or G
gggaatgtgaaatttacatcatttctttttgggagagacttgttttggatgccccctaatccccttctcccctgcactgtaaaatgtgggattatgggtcacaggaaaaagtgggttttttagttgaattttttttaacattcctcatgaatgtaaatttgtactatttaactgactattcttgatgtaaaatcttgtcatgtgtataaaaataaaaaagatcccanatnanaaaaaaaaaaaaaaaaaaaaaaaa

SEQ ID NO: 1168 - DNA, 266 bp, Homo sapiens
cacaatgtaaaaaagaatagtaatatcagaacaggaaggaggaatggcttgctggggagcccatccaggacactgggagcacatagagattcacccatgtttgttgaacttagagtcattctcatgcttttctttataattcacacatatatgcagagaagatatgttcttgttaacattgtatacaacatagccccaaatatagtaagatctatactagataatcctagatgaaatgttagagatgctatatgatacaactgtgg

SEQ ID NO: 1169 - DNA, 143 bp, Homo sapiens
catttaccagggctctgaggccgacagcgtcttcagcggcttcctcatcttcccatctgcctgagccagggaaggaccccctcccccatccacctctctggcttccatgctccgcctgtaaaatgggggcgctattgcttcag

SEQ ID NO: 1170 - DNA, 448 bp, Homo sapiens
aaaggattatagtgctgcattgtctgaagttagcacctcttggactgaatcgtttgtctagactacatgtattacaaagtctctttggcaagattgcagcaagatcatgtgcatatcatcccattgtaaagcgacttcaaaaatatgggaacacagttagttatttttacacagttctttttgtttttgtgtgtgtgtgctgtcgcttgtcgacaacagctttttgttttcctcaatgaggagtgttgctcatttgtgagccttcattaactcgaagtgaaatggttaaaaatatttatcctgttagaataggctgcatctttttaacaactcattaaaaaacaaaacaactctggcttttgagatgacttatactaatttacattgtttaccaagctgtagtgctttaagaacactacttaaaaagcaaaataaacttggtttacat

SEQ ID NO: 1171 - DNA, 323 bp, Homo sapiens
  misc_feature (1)...(323): n = A,T,C or G
ggnagacaangtattttatttctgactgattttagaaaaaacttgtgtacatgtgtttggaactgttgaaatgccaagttttctgtataagtgtttttgtaattaaactttcagattttctttgttttttaagaagttgatgtgcttgtttgacatttgtctcattaaaacttttctacgttgaattcacctgtttcaattttacttgctttgtaacaaaaagtcctacctctggccgggcacggtggctcatgcctgtaatcccaacactttggaaggccaaggcaggcagatcacgaggtcaagaaatcgagaccatcctg

SEQ ID NO: 1172 - DNA, 232 bp, Homo sapiens
ccagtttgtgcagttccagtagtgactgattcacatttttttccaaatgtaatgcacactccattgcattcagcccgctctcccagtcatcacagtctggtttcttgatatcctgaaggaagattcagccacctcgttggttctgcagcttcatcagtttctcagcatgttccctctcctcatgagattggtgaagaaagtatttggcaaagttcttcaaagccacatcatc

SEQ ID NO: 1173 - DNA, 425 bp, Homo sapiens
caatctttcctgttgcctgtggagtctctgctgaaatgaatcaggattcgagctctaggatgagacagaaaatgaaagcatgttgtttgccaggacactgtgggtttatattgatgtgtaacaagttgatttggaacactggactctcattctgttattctggttttgttttttttgttttgttttttttcttttgtaaaggcaatgagctagtcccagaaaggatccttcagttacatacaatttgtttaatgaaatgtcatggctctgttcatatttttgtcttgttcttccaattggtatatacaactttcagagcctcttgtatttggaaggctggaagggcccagactttggaatagtgtcttggtttcactgtttttgttttgatttttttttgttttgattttttttacctcggccgc

SEQ ID NO: 1174 - DNA, 200 bp, Homo sapiens
aaaataacagctaaaagaaaagctctgaatgttactctttattctggtaggtatgatttacccagtattgtttacatgccttgatttagtatcagtgagtatctcctgtatgcaaggcgctcagagccatgattcctagcttctaacatccgatttctaggcctctcatgcagatgccaataaaggatctgtgtacagcc

SEQ ID NO: 1175 - DNA, 194 bp, Homo sapiens
ctgtggaggagggtttcagaggagagaggtcggagagcagaggcctgagaagccagaggcaggtggagagagggtggaaagtgagcagcgggctgggctggagccgcacacgctctcctcccatgttaaatagcacctttagaaaaattcacaagtccccatccacaaaaaaaaaaaaaaaaaaaaaaattttc

SEQ ID NO: 1176 - DNA, 140 bp, Homo sapiens
aaacaaaaccagagtcatctggggaaaagtaactcgggcccatggaaacagtggcatggttcgtgccaaattccgaagcaatcttcctgctaaggccattggacacagaatccgagtgatgctgtacccctcaaggattt

SEQ ID NO: 1177 - DNA, 189 bp, Homo sapiens
aaacttcacgttgtccttatttttcttgatcttgacagatttggcatcctttcgtcgggctgtgagcaggaagtccttgatttcctcaattttccgaggcatggcgacgaggcgcgctgggctctggcgcggaccaggacctttctcacccacgtatcaccctagagacactcacagcaagcagcaacc

SEQ ID NO: 1178 - DNA, 171 bp, Homo sapiens
ccaggggtaggatagtataggaagtagaaggggaaggagggttagatagagaatgctgaataggcagtagttgggagagagcctcaatattgggggaggggagagtgtagggaaaaggatccactgggtgaatcctccctctcagaaccaataaaatagaattgacctttt

SEQ ID NO: 1179 - DNA, 432 bp, Homo sapiens
ggcaggttctaaaagatctagttaaagttattcaacaggagtcttacacatataaagacccaattacagaatttgttgaatgtttatatgttaactttgactttgatggggctcagaaaaagctgagggaatgtgaatcagtgcttgtgaatgacttcttcttggtggcttgtcttgaggatttcattgaaaatgcccgtctcttcatatttgagactttctgtcgcatccaccagtgtatcagcattaacatgttggcagataaattgaacatgactccagaagaagctgaaaggtggattgtaaatttgattagaaatgcaagactggatgccaagattgattctaaattaggtcatgtggttatgggtaacaatgcagtctcaccctatcagcaagtgattgaaaagaccaaaagcctttcctttagaa

SEQ ID NO: 1180 - DNA, 251 bp, Homo sapiens
agacaactggctttggcatgatttatgattccctggattatgcaaagaaaaatgaacccaaacatagacttgcaagacatggcctgtatgagaagaaaaagacctcaagaaagcaacgaaaggaacgcaagaacagaatgaagaaagtcagggggactgcaaaggccaatgttggtgctggcaaaaagaagtgagctggagattggatcacagccgaaggagtaaaggtgctgcaatgatgttagctgtgg

SEQ ID NO: 1181 - DNA, 122 bp, Homo sapiens
  misc_feature (1)...(122): n = A,T,C or G
ncgagtcctggccttgtctgtggagacggattacaccttcccacttgctgaaaaggtcaaggccttcttggctgatccatctgcctttgtggctgctgcccctgtggctgctgtcaccacag

SEQ ID NO: 1182 - DNA, 277 bp, Homo sapiens
  misc_feature (1)...(277): n = A,T,C or G
nctgccctcttgggtttaggtgttgttccttcacggaatccatgcctgaatctgcggtatacaatttttaggtgcctcattcgaccagttccggtggtatttcgtcttttagccttggcactccagttatactttctcttgcgcttggcagggtagccacatttgccacaggtcgacttctgaaggtggtaggccttanagccacagcggcggcacaacgtgtgcgtcttattgcgacgctttccaaacgatgacnttcccttngcatctcgcacct

SEQ ID NO: 1183 - DNA, 257 bp, Homo sapiens
atgccccctaagtgacccggacacttccgagggggccatcaccgcctgtgtatataacgtttccggtattactctgctacacgtagcctttttacttttggggttttgtttttgttctgaactttcctgttaccttttcagggctgacgtcacatgtaggtggcgtgtatgagtggagacgggcctgggtcttggggactggagggcaggggtccttctgccctggggtcccagggtgctctgcctgctcagccagg

SEQ ID NO: 1184 - DNA, 206 bp, Homo sapiens
gcgcttgcgtgtcggcctctgtggcaggtgcgagtgacacagtggaagcaggctaagtcctatcagccatggaaacaccattgctctcttcttccggtcactgttgccaaactataccatggagggggagaggcccgaggaaggagtggctgggggtctgaaccgcaaccagggcctgaacaggctgatgctggctgtgcgcgaca

SEQ ID NO: 1185 - DNA, 175 bp, Homo sapiens
ccctatcacacgtggccttgtctagaccctgtcctgagcaggggagaggctcttgagacctgatgccctcctacccacatggttctcccactgccctgtctgctctgctgctacagaggggcagggcctcccccagcccacgcttaggaatgcttggcctctggcaggcaggcag

SEQ ID NO: 1186 - DNA, 291 bp, Homo sapiens
ccacatcggcagggtcggagccctggccgccatactcgaactggaatccatcggtcatgctctcgccgaaccagacatgcctcttgtccttggggttcttgctgatgtaccagttcttctgggccacactgggctgagtggggtacacgcaggtctcaccagtctccatgttgcagaagactttgatggcatccaggttgcagccttggttggggtcaatccagtactctccactcttccagtcagagtggcacatcttgaggtcacggcaggtgcgggcggggttcttgc

SEQ ID NO: 1187 - DNA, 171 bp, Homo sapiens
aaaaggtcaattctattttattggttctgagagggaggattcacccagtggatccttttccctacactctcccctcccccaatattgaggctctctcccaactactgcctattcagcattctctatctaaccctccttccccttctacttcctatactatcctacccctgg

SEQ ID NO: 1188 - DNA, 292 bp, Homo sapiens
cctccagggcatgtaagaggcacagaacactcccagaacccagaatctgctgtcatctgagtgcctgagcaacttacataaccatcagcttttagacgaacttacacatttcctatttgacagaaatctcttccacaatttggtcactacatttgacttgctatttcaaaagaagtccacatgtcatgaaacaccaaccaatttttatcaatcacttaccaatatgaggttaagaagttaagacaaccatttttacagataaaacacatgaatccaatgaccttcctcacag

SEQ ID NO: 1189 - DNA, 263 bp, Homo sapiens
  misc_feature (1)...(263): n = A,T,C or G
aaatgtcccacgtttatttacatatgaaatgtgtttcatacagttatgatggatggagtgcataacacctgacagcagcaagaccttttgaggaaccgaacattgactacagtatatcatgcaagtatctatatatacacaaaagaattccttttcttaaaaaaaaaaaaaaaanggnncaaaacntntncggggntaantccaaaatccaaatnncaaaaaaaancccaaaccaaacccaaaaantaaanctntntcaaaaa

SEQ ID NO: 1190 - DNA, 159 bp, Homo sapiens
ggcaggtgtggtgtttgtgggcacgagaggggcagagaatggagagtgaggctaccacatgaagcgtcaccagagctgctccctgctgcctgctcagagcaccccggatccactgttcaatctgcacaagattcggggtccagacatgggagacttcag

SEQ ID NO: 1191 - DNA, 738 bp, Homo sapiens
  misc_feature (1)...(738): n = A,T,C or G
ncctgggaccaaatgaaggctgagaggtatggctcatcggtacaagagagatgcaaaaaactaagttggaaagtaaaggctacacacacatatggagcaccccatcccacagcacattacatccacctcacttcacagaacggagaacagagcagaaatgaccagaacacctttgtcaccatcacacagccctcctaaaatggaaccaaagcttcccagctccctcaaagctttggatgcaaagaaggcaccctgacttccacaagacaccagaattcacacggtactcagaggcactgctggggaagtttgttggtctttattagataaatttccagagacctgtccataatacccaacagaacatgactgtttctttgaggaaagggttataatgtctgtggtgtacaagtcgtttttggtataacttctttcctgctgctgctgcttcccggcaaacatagttttcctatttcaggcagagtgcggtatattccaggaaacacttgtttcctactcacttagcttactttctttgttgaatgcctcactaatggccaagtttcaanatgttttgggtgacaatgcacacattgcttgggcaaaaagggtgatgggaccctcggccccnaccacgcctaaagggcgnaatttccanncacactgggcnggccgctactaanggatncgancntcggtancnaaccttngggcgnaannaatgggccatagnctgct

SEQ ID NO: 1192 - DNA, 105 bp, Homo sapiens
ggaaccgtggcgtccctgcgtggggcccatgggtgagacactccagtactgagacctagagtccagatgcttgtaggagccaagtcgtgttctaagtatttattt

SEQ ID NO: 1193 - DNA, 346 bp, Homo sapiens
  misc_feature (1)...(346): n = A,T,C or G
nctgattttatttccttctcaaaaaaagttatttacagaaggtatatatcaacaatctgacaggcagtgaacttgacatgattagttggcatgattttttcttttttttcccccaaacattgtttttgtggccttgaattttaagacaaatattctacacggcatattgcacaggatggatggcaaaaaaaagtttaaaaacaaaaacccttaacggaactgccttaaaaaggcagacgtcctagtgcctgtcatgttatattaaacatacatacacacaatctttttgcttattataatacagacttaaatgtacaaagatgttttccacttttttcaattttta

SEQ ID NO: 1194 - DNA, 207 bp, Homo sapiens; identical to SEQ ID NO: 1105

SEQ ID NO: 1195 - DNA, 627 bp, Homo sapiens
  misc_feature (1)...(627): n = A,T,C or G
ctgggncctacattagtgccttacgggtgaacaaggtgattgagattaacccttacctgcttggcaccatgtctggctgtgcagcagactgtcagtactgggagcgcctgctggccaaggaatgcaggctgtactatctgcgaaatggagaacgtatttcagtgtcggcagcctccaagctgctgtccaacatgatgtgccagtaccggggcatgggcctctctatgggcagtatgatctgtggctgggataagaagggtcctggactctactacgtggatgaacatgggactcggctctcaggaaatatgttctccacgggtagtgggaacacttatgcctacggggtcatggacagtggctatcggcctaatcttagccctgaagaggcctatgaccttggccgcagggctattgcttatgccactcacagagacagctattctggaggcgttgtcaatatgtnccacatgaaggaagatggntgggtgaaagtagaaagtacagatgncagtnacctgctganccantaccgggaaacncatcaatantgggnggtggnggaagancntcngcctgagaccaccgctaagggggcgaaatttccagnacaactttgtcngnacc

SEQ ID NO: 1196 - DNA, 374 bp, Homo sapiens
  misc_feature (1)...(374): n = A,T,C or G
atgacattggtggtcctgatcaagaatttggngtggacgttggccctgtttgctttttataaaccaaactctatctgaaatcccaacaaaagaaatttaactccatatgtgttcctcttgttctaatcttgtcaaccagtgcaagtgaccgacaaaattccagttatttatttccaaaatgtttggaaacagtataatttgacaaagaaaaatgatacttctctttttttgctgttccaccaaatacaattcaaatgctttttgttttatttttttaccaattccaatttcaaaatgtctcaatggtgctataataaataaacttcaacactctttatgataaaaaaaaaaaaaaaaaaaaaaaaaaaaaaaaa

SEQ ID NO: 1197 - DNA, 279 bp, Homo sapiens
  misc_feature (1)...(279): n = A,T,C or G
gggaaggaaagaacttgcatgttggtgaaggaagaagtggggtggaagaagtggggtgggacgacagtgaaatctagagtaaaaccaagctggcccaaggtgtcctgcaggctgtaatgcagtttaatcagagtgccatttttttttttgttcaaatgattttaattnttgnaatgcncaatttttttaatntncaaataaaaagtttacctgcccgggcggccgntcaagggcaaattccaccncactggcggccgttnctagnggatccnagctcgg

SEQ ID NO: 1198 - DNA, 293 bp, Homo sapiens
gagacgatgaagaacaattagactggacccacccaccacagcccatcaccctccatttccacttggtgtttggttcctgttcactctgttaataagaaaccctaagccaagaccctctacgaacattctttgggcctcctggactacaggagatgctgccacttaataatcaacctggggttcgaaatcagtgagacctggattcaaattctgccttgaaatattgtgactctgggaatgacaacacctggtttgttctctgttgtatccccagccccaaagacagctcctgg

SEQ ID NO: 1199 - DNA, 561 bp, Homo sapiens
ctgggtaccattccgggtcatccgcagaaattcctcatagatggcaactctgtctactctccgagccagtggcgagaagttacacagggagtccaccccggtgtggtgcctgttggggacagacctgaatgttgaaacttgacagtcagaaaaataactcttgatgctgctgtttcggaagagttggttgagcacccccttctcaccgcatcctcaatattccttttgttcctctggtaattggtggtgcctggctgggctttgtcctgggaatatggtaggttggtgatggtgaaattcaggtagaagtgctgggtgctggagctgcttgttggttgataaactgatgactccatttctgtcacatggatgtccaccaactggtaggtggagcccagccaatggaatgaggcattcagggtcttatctagaaagacttgctccaccaggctggggtccaaattggaggagaacaatgccttgacagtgaccaacacggagtccatcgtcaagttggtacctgcccgggcggccgctcgagccctatagtgagtcgtatta

SEQ ID NO: 1200 - DNA, 335 bp, Homo sapiens
  misc_feature (1)...(335): n = A,T,C or G
cgaggaaatagtatcatcatgttagaagccttggaacgagtataaataatggctgttcagcagagaaacccatgtcctctctccatagggcctgttttactatgatgtaaaaattaggtcatgtacattttcatattagactttttgttaaataaacttttgtaatagtcaaaaatgctttctcagatgttctgaatatagaatatcagctctcattccagttttttctaacatgaattttcctggttgacattgatttcaaagggttttatgcattaaagtgaaagaatcttattaaatgcnaaaaaaaaaaaaaaaaaaaaaaaanntttttt

SEQ ID NO: 1201 - DNA, 441 bp, Homo sapiens
ggcaggtaaaaaagtgacattgctttattactattggcaggtggggcctgcatgaggtggttagtgtgctcaggggatgggtgggctgtggagatgatgacagaaaggctggaaggaaagggggtgggtttgaaggccagggccaaggggtcctcaggtccgcttctgggaagggacagccttgaggaaggagtcatggcaagccatagctaggccaccaatcagattaagaaattctgagaaatctagctgaccatcactgttggtgtccagtttcttcatcatgcggtcaaggacaccagggtccttctggttctttgtgaaggcagctagttctgtattcatgaagcttaggaactctgtcttggagagagtgtagttataaccatcctttccagcatacttctggaagacagcaatcagggactcgatgcaccgctc

SEQ ID NO: 1202 - DNA, 311 bp, Homo sapiens
  misc_feature (1)...(311): n = A,T,C or G
gcatttttcacatttgtcaactctggttanaaacaggtcctcaggagtattctctaacctgatattttctaaaaagatatgttgattcaactttgtttagcatcctactttctagattgtggggctcattttgccagggccaagctaccagaaaagtagaagtggagattacctggtatgtatctctctgggtgccccagttagagctgccacagctcaggaaaaagatgaggcataacgaccttgaatgtaattggagtaagtgacnaaataagaactaccctgggaaaccctgcattcaatgtanctgt

SEQ ID NO: 1203 - DNA, 307 bp, Homo sapiens
ctgttgccgaggcctgggctcgcctggaccacaagtttgacctgatgtatgccaagcgtgcctttgttcactggtacgtgggtgaggggatggaggaaggcgagttttcagaggcccgtgaggacatggctgcccttgagaaggattatgaggaggttggagcagatagtgctgacggagaggatgagggtgaagagtattaacctgtgtgctgtacttttacactcctttgtcttggaactgtcttatttttgttctgtaaatgtctattgccgtaaattgttaataaaattgatgtttccatttt

SEQ ID NO: 1204 - DNA, 714 bp, Homo sapiens
  misc_feature (1)...(714): n = A,T,C or G
ctggaaccacaaagcagccctctaaggaggaggaggaagaggaggaggaggaacaactgaaccagaccttggcagaaatgaaggcccaggaggtggcggaattgaagaggaagaaaaagaagctgttgcgtgagcagagaaagcagcgggagcgtgtggagctgaagatggatccgcctggggtttccattgcagacgagggggagactggcatgttctccttgagcaccatccggggtcaccagttattagaggaagtaacacaaggggatatgagtgcagcagacacatttctgtccgatctgccaagggatgatatctatgtgtcagatgttgaggacgacggtgatgacacatctctggatagtgacctggatccagaggagctggcaggagtcaggggacatcagggtctaanggaccaaaagcgtatgcgacttactgaagtgcaagatgataaagaggaggaggaggaggagaatccactgctggtaccactggaggaaaaggcagtactgcaggaagaacaagccaacctgtggttctcaaagggcagcttttnctgggatcgaggacgatgcccnatgaggccctggagatcagtncaggccccagacctgccccggggcgggnccgcttcaagggcnaaatttcccanccaccaccttggccggnccgtttnncttaantggggattncccaanncttccgggt

SEQ ID NO: 1205 - DNA, 336 bp, Homo sapiens
aaggaatcgtatcgtatgtccgctatccagaacctccactctttcgacccctttgctgatgcaagtaagggtgatgacctgcttcctgctggcactgaggattatatccatataagaattcaacagagaaacggcaggaagacccttactactgtccaagggatcgctgatgattacgataaaaagaaactagtgaaggcgtttaagaaaaagtttgcctgcaatggtactgtaattgagcatccggaatatggagaagtaattcagctacagggtgaccaacgcaagaacatatgccagttcctcgtagagattggactggctaaggacgatcag

SEQ ID NO: 1206 - DNA, 274 bp, Homo sapiens
  misc_feature (1)...(274): n = A,T,C or G
ntggcagtgcaaatatccaagaagaggaagtttgtcgctgatggcatcttcaaagctgaactgaatgagtttcttactcgggagctggctgaagatggctactctggagttgagatgcgagttacaccaaccaggacagaaatcattatcttagccaccagaacacagaatgttcttggtgagaagggccggcggattcgggaactgactgctgtagttcagaagaggtttggctttccagagggcagtgtagagctttatgctgaaaaggtgg

SEQ ID NO: 1207 - DNA, 240 bp, Homo sapiens
  misc_feature (1)...(240): n = A,T,C or G
tgtttcccagcaaagatcaacctctgctggtcaggagggatgccttccttgtcttggatctttgccttgacattctcgatggtgtcactcggctccacttcgagagtgatggtcttaccagtcagggtcttcacgaagatctgcatcccacctctaagacggagcaccaggtgcagggtggactctttntggatgttgtantcagacagggtgcgtccatcttccagatntnncccagca

SEQ ID NO: 1208 - DNA, 161 bp, Homo sapiens
aaagaagtaagcctttatttccttgttttgcaaataaaactggctaagttggttgctttttggtgattagtcaaagagaccaaatcccatatcctcgtccgactcctccgactcttccttggcttcaaccttagctggggctgcagcagcagcaggagcag

SEQ ID NO: 1209 - DNA, 206 bp, Homo sapiens
gcagaaaaaagggttgccaccccagttgattggaaggatggggatagtgtgatggtccttccaaccatccctgaagaagaagctaaaaaacttttcccgaaaggagtcttcaccaaagagctcccatctggcaagaaatacctccgctacacaccccagccttaagtctcttggagaagctggtgctgtgagccagaggatgtcag

SEQ ID NO: 1210 - DNA, 209 bp, Homo sapiens
  misc_feature (1)...(209): n = A,T,C or G
nctggctttctacacacaccactgtccaggtgggaagggcagccactgctgctcctgcattcacccaaggaaacaaaggaaaggtgcggcgaggcagggtggggtgagtaatcagcttgcacttctgagccctggcaaccctaccatcctctcctgctgggctcagattgaatttggggaggtatttattctcatgcccatttcccacc

SEQ ID NO: 1211 - DNA, 427 bp, Homo sapiens
aaaatagatgattataacggggcagagaactttcttttctctgcaagaatgttacatattgtatagataaatgagtgacatttcataccatgtatatatagagatgttctataagtgtgagaaagtatatgctttaatagatactgtaattataagatatttttaattaaatatttttttgtaaatattatgtgtgtgtttttttttaatctatgggaatatttcttttggaaaatcatttttcagctcaattacagagctcttgatatcttgaatgtcttttctgtttggcctggctcttaatttgcttttgttttgcccagtatagactcggaagtaacagttatagctagtggtcttgcatgattgcatgagatgtttaatcacaaattaaacttgttctgagtccattcaaatgtgttttttt

SEQ ID NO: 1212 - DNA, 386 bp, Homo sapiens
aaaatcttgcatggcattaattgttccttgcttttatagttgtattttgtacattttggatttctttatataaggtcatagattcttgagctgttgtggtttttagtgcacttaatattagcttgcttaaggcatacttttaatcaagtagaacaaaaactattatcaccaggatttatacatacagagattgtagtatttagtatatgaaatattttgaatacacatctctgtcagtgtgaaaattcagcggcagtgtgtccatcatattaaaaatatacaagctacagttgtccagatcactgaattggaacttttctcctgcatgtgtatatatgtcaaattgtcagcatgacaaaagtgacagatgttatttttgtattttt

SEQ ID NO: 1213 - DNA, 680 bp, Homo sapiens
  misc_feature (1)...(680): n = A,T,C or G
nctgataccacacattgaaaggtaaacattaatatttcaaatctgatgtctaactaaaaatgtacagaatgaaaactagaaaatttcaaccccagattatcttcaaccttgctccctccaccaatcatactttgacatttatctatttccttctccacttatggatgtaattggcttgctatagaaactacagttcagatgctttgaatgtatgaactacaatgaacaataaagtcctcttcttttgaagcatattttggcttcagctttaagataatcttatgacaagaagggtcacactgattcacttaataaattccattcttacctaacacaaggtttagttgataagcacttggacaaaaataatacttttcaaaaatgtaaagcaaactagtgaggacaaaggattttgtcctcatctcaacaatgatcagctattggaactgcatgaaactgaacaatttaaacctggagctggtaatgttcttaagaccaattcagaacaaaggcaggttgcccttaaaacaggtttgaccttttccttcactcttcctcctgtcccaccctctgtgagtgatttaaaaacggaaaaggtcaaagcccagccaggcctacatttagagaaattttaaaaaaatttttnctttcaatttttggacctcggncgcgacccccgc

SEQ ID NO: 1214 - DNA, 77 bp, Homo sapiens
  misc_feature (1)...(77): n = A,T,C or G
gtcatcttttattatgaagacaataaactcaagattttattgtcttcataataaaagatgacacntgcaagggcggc

SEQ ID NO: 1215 - DNA, 332 bp, Homo sapiens
ggtggaatgtgatgttcagcagcaaacttgcaacagactggccttctgtttgttactttcaaaaggcccacatgatacaattagagaattcccaccgcacaaaaaaagttcctaagtatgttaaatatgtcaagctttttaggcttgtcacaaatgattgctttgttttcctaagtcatcaaaatgtatataaattatctagattggataacagtcttgcatgtttatcatgttacaatttaatattccatcctgcccaacccttcctctcccatcctcaaaaaagggccattttatgatgcattgcacaccctctggggaaattgatcttt

SEQ ID NO: 1216 - DNA, 603 bp, Homo sapiens
aaattgcattcttttcaaatttataagtctaagaaaacaaaaccaaataaaagaagccattccaaggagtgcgtatttgccatttgactgcaacaaaaggcccggccacactgagctaaaaggtaatactctcgaccccattcttctaacacagaaaactttctcaggtaaactgtggggttatgagaatccccctaactagaaatgttgatgggaactgagcattgcttgctttcatcaggtgttcttgttgccaaagacatgaacgatactgaggaaaacgacaagagtgagcattcccgccagtaaatcttcaagggtggcatccgtttcaatttatacttggaagtatttttaattaaaaacaatcaataccaaaaagcttttattttgtgggtttaaaagtcacaaatcacagtgggagaatgccaaattgctttagcttggaactactgaagacgcacatagcatttattataaggcctactcttaggcagttcactctcaaagcaatgaaaataatctcaaaccaaacattacagtgggtttgaagcgttcctacgtttcttccgagcaggtcagttttacatttgctacacagca

SEQ ID NO: 1217 - DNA, 777 bp, Homo sapiens
  misc_feature (1)...(777): n = A,T,C or G
aaaccaatcttccaggagattaatcaatgaaatttataagttttatcaacgtataaaatttttttcatcttctgggactcatagaatacaatctgtgtttctgaccagttgaggtagttaaaatagggagggcttttctaatttcgtatttgactatttcagaaagaaaggttatcttttactggtgagcacagtcattgctctgcagatgggctaggattcaaagaatataacacagtgttgttatcataaagagtgttgaagtttatttattatagcaccattgagacattttgaaattggaactggtaaaaaaataaaacaaaaagcatttgaattgtatttggtggaacagcaaaaaaagagaagtatcatttttctttgtcaaattatactgtttccaaacattttggaaataaataactggaattttgtcggtcacttgcactggttgacaagattagaacaagaggaacacatatggagttaaattttttttgttgggatttcagatagagtttggtttataaaaagcaaacagggccaacgtccacaccaaattcttgatcaggaccaccaatgtcatagggtgcaatatctacaatagggagtctccagcctttgccgtgttcgatattcaaagactgttttgctccattcccccagtggggtttcgngcaacccnttccttccanaaactggtgtaaggggggaaatttgcttttttccctttcanccctttgaaattnncccctttcattttggaccccccatcnc

SEQ ID NO: 1218 - DNA, 487 bp, Homo sapiens
  misc_feature (1)...(487): n = A,T,C or G
aaattgncaagaagaaaattcttngacatttgggggctggnngacatttgggggcaagggttccactgaaaaatcccccaaattcacgctgaggtttcaggtcatggttgctgaggtggaagatgaggtcagggctcttggagattttccaacccaccctagaacttgtttctaaatggctggggaagaggtcagtataggtccccccgttactgcagatgaaggcagaagtcattctctcccccacccctcaacttcttcagagatgtggagataggaggcttcgatctctaattacctacgatctcttaaaaatataaaacacgtgcagttgactttggtacaaaaaagaaaacaaaagaacaacaaaacattctggtccctgtgggttttttccctcacccccacaaaccattatggacctcggcccgcnaccacnctaagggcgaaattccancacacttgcngcccgttactagnggatccc

SEQ ID NO: 1219 - DNA, 553 bp, Homo sapiens
  misc_feature (1)...(553): n = A,T,C or G
ttcccctttaatctagatagaaatactctttatcagagatttaaggcactgttttgctaactggtaaataaaaccaaatgtaaatatgtaagaatgtttatttgttgcacataacttttttggtataaaataaatgtagaagttacctgtggaagttgtgctcccattattcttaaactgcagggttgcattccaaaagaactgaaacgaagtctttttagactcagtaggagccttatattcttgaagtcaatactgtaacctcatttctaaggtatacagggttgattctttttctcttaaatcatatgtaacttgcagaagattcagagtcctcagacctctagttcttggaattcctgtaggtttacggtgtatgtgattgtcaagaattaatgacaaaaatgtgtcactgcctacagttctgtgaacactcagaatgtattaatgagctgtttttccatagttttactttagcttaccttgaatactccctgtataatcctctaaaaaggtagcatcggcaagaaagatgaatncgttggaaatacag

SEQ ID NO: 1220 - DNA, 152 bp, Homo sapiens
  misc_feature (1)...(152): n = A,T,C or G
ncgcaggagtgcccgcgactgagccgcctcccaccactccactcctccagccaccacccacaatcacaagaagattcccacccctgcctcccatgcctggtcccaagacagtgagacagtctggaaagtgatgtcagaatagcttccaataa

SEQ ID NO: 1221 - DNA, 306 bp, Homo sapiens
ccaggattttcatgaggggccgtagcttgagccaccactgttctttgggaatcctgtgctcaaaatccgtttgcttcttcagctctgccacaggttgaaaaataacgtttcttttgcttattcccagcacacaaatggaatcatcggtggtaaatttttttcctctgccccgggcctccttgagttttgcagtgatccactccatagctctggcagagattttggttccaaagtttctatcaaatggagagggtgccccaccctgctgcatgtgacccagcacgttcttcctgcagtcaaacacgc

SEQ ID NO: 1222 - DNA, 139 bp, Homo sapiens
ctggagcctgagtccgctgcacggagactctggtgtgggtcttgacgaggtggtcagtgaactcctgatagggagacttggtgaatacagtctccttccagaggtcgggggtcaggtagctgtaggtcttagaaatggc

SEQ ID NO: 1223 - DNA, 351 bp, Homo sapiens
  misc_feature (1)...(351): n = A,T,C or G
ngcagcatcaggcctggctccaaagcatcgcggagaaagacaacaacctggttcctattggcaagccagcctcagagcactatgatgacgaggaagaagaggatgatgaagatgatgaggatagtgaagaggactcagaggatgatgaggatatgcaggacatggacgagatgaatgactacaatgagtcaccggatgatggagaggtcaatgaggtggacatggaaggcaacgaacaggatcaggaccagtggatgatctaggtagacaaggcagggtggcctcagggagattccaggccagcccaaactaccctgcatcccaacccccaacccctgcccacagaaccag

SEQ ID NO: 1224 - DNA, 132 bp, Homo sapiens
  misc_feature (1)...(132): n = A,T,C or G
nggaatttggtataattatggtgggtgattattttttatactgtatgtgccaaagctttactactgtggaaagacaactgttttaataaaagatttacattccgcaaaaaaaaaaaaaaaaaaaaaaaaaaa

SEQ ID NO: 1225 - DNA, 523 bp, Homo sapiens
  misc_feature (1)...(523): n = A,T,C or G
ccagaaaggtgacagtggtcttccagggcctcctgggcctccaggtccacctggtgaagtcattcagcctttaccaatcttgtcctccaaaaaaacgagaagacatactgaaggcatgcaagcagatgcagatgataatattcttgattactcggatggaatggaagaaatatttggttccctcaattccctgaaacaagacattgagcatatgaaatttccaatgggtactcagaccaatccagcccgaacttgtaaagacctgcaactcagccatcctgacttcccagatggtgaatattggattgatcctaaccaaggttgctcaggagattccttcaaagtttactgtaatttcacatctggtggtgagacttgcatttatccagacaaaaaatctgagggagtaanaatttcatcattggacctgcccgggcggccgntcgaaagggcgaattccancacacttggcggccgttcttagnggatccnanctcggtnccaaacttgggngnaatnatgg

SEQ ID NO: 1226 - DNA, 531 bp, Homo sapiens
  misc_feature (1)...(531): n = A,T,C or G
aaacattacccagcatcattgtttataatcagaaactctggtccttctgtctggtggcacttanagtcttttgtgccataatgcagcagtatggagggaggattttatggagaaatggggatagtcttcatgaccacaaataaataaaggaaaactaagctgcattgtgggttttgaaaaggttattatacttcttaacaattctttttttcagggacttttctagctgtatgactgttacttgaccttctttgaaaagcattcccaaaatgctctattttagatagattaacattaaccaacataattttttttagatcgagtcagcataaatttctaagtcagcctctagtcgtggttcatcnctttccctgcattttatttggtgtttgtctgaagaaaggaaagaggaaagcnaataccnaattgtactatttgtaccaaatctttgggattcattggcaaaaaaattcagngggggngnattattaaatanaaaanaaaaattttgttcctnggtnnaaggctaat

SEQ ID NO: 1227 - DNA, 292 bp, Homo sapiens
aaacttccctctgtggaagatattcaaaagccacaagtggtgcaaatgtttatggtttttatttttcaatttttattttggttttcttacaaaggttgacattttccataacaggtgtaagagtgttgaaaaaaaaattcaaatttttgggggagcgggggaaggagttaatgaaactgtattgcacaatgctctgatcaatccttctttttctcttttgcccacaatttaagcaagtagatgtgcagaagaaatggaaggattcagctttcagttaaaaaagaagaagaag

SEQ ID NO: 1228 - DNA, 340 bp, Homo sapiens
gttcacattgataaagagacggcgagtcgactgaagtctatgattaacactactttgatcatcaccaacataccctacatcatcatggcgctgggtgtgttctttggtttggtttttacctggcttgcatgcaaaggacagggatccatggatgagggaacagcggatgaaagagcacccctcattcgaacctaaacattgcctttgcttggtgaagaaactatgtgagctgtcctgacctggacgatgacgtggggaaacgctccacctccttgcaggcttgttgcctgttgaaagaaggaaaaagacacagcgctggcaagtgataggaacattctgg

SEQ ID NO: 1229 - DNA, 296 bp, Homo sapiens
  misc_feature (1)...(296): n = A,T,C or G
ggaaatctgaaatagagtactatgctatgttggctaaaactggtgtccatcactacagtggcaataatattgaactgggcacagcatgcggaaaatactacagagtgtgcacactggctatcattgatccaggtgactctgacatcattagaagcatgccagaacagactggtgaaaagtaaaccttttcacctacaaaatttcacctgcaaaccttaaacctgcaaaattttcctttaataaaatttgcttgttttaaaaacaaaaaaaaaaaaaaaaaaacccntcccgggggg

SEQ ID NO: 1230 - DNA, 90 bp, Homo sapiens
ctaatacgactcactatagggctcgagggccgcccgggcaggtaaaaagttatttatttattctttttttttttttttttttgggaaggg

SEQ ID NO: 1231 - DNA, 284 bp, Homo sapiens
ctgggcgatgtgcgagctgatagtgagcggcagaatcaggagtaccagcggctcatggacatcaagtcgcggctggagcaggagattgccacctaccgcagcctgctcgagggacaggaagatcactacaacaatttgtctgcctccaaggtcctctgaggcagcaggctctggggcttctgctgtcctttggagggtgtcttctgggtagagggatgggaaggaagggacccttacccccggctcttctcctgacctgccaataaaaatttatggtccaaggg

SEQ ID NO: 1232 - DNA, 580 bp, Homo sapiens
  misc_feature (1)...(580): n = A,T,C or G
gtcagcctttgaggaaaccggcaagaccaaggaggtgattgacacgggctatggcatcctggaccagaaggcctctggagtcaaatacaccaagtcggacttgcggttaatcgaagtcactgagaccatttgtaagaggctcctggattatagcctgcacaaggagaggaccggcagcaatcgatttgccaagggcatgtcagagacctttgagacattacacaacctggtacacaaaggggtcaaggtggtgatggacatcccctatgagctgtggaacgagacttctgcagaggtggctgacctcaagaagcagtgtgatgtgctggtggaagagtttgaggaggtgatcgaggactggtacaggaaccaccaggaggaagacctgactgaattcctctgcgccaaccacgtgctgaagggaaaagacaccagttgcctggcagagcantggtccggcaagaagggagacacagacctgcccgggcggccgctcgaaagggcgaattccacacactttgnggccgtactaatggatccnactcggncccancttgcgtaatcattggcatactnnnnt

SEQ ID NO: 1233 - DNA, 153 bp, Homo sapiens
aaacttgatccaacctctttgcatcttacaaagttaaacagctaaaagaagtaaaataagaaggcaatgcttgtggaatgtacagtgcatattggcggcgcacgcctcattacgattcgcctgcttgcttctcctgttcaacctgcccggccg

SEQ ID NO: 1234 - DNA, 416 bp, Homo sapiens
ccaaacaagaagacggcagtctctccagaaccacccagggcggcactggtcacagtttcattccagatcgttaaggtgatttgctctgtggctcaggtgacacagtgtgtctggatgcacatgatcacttgactcggtttctatactcaaatatacagatgcagagtgaactcaaacacacaggcattccactgcagagcagatgataacaaaacaagtggctggggacaggggtcattcaacaaccttcatttggtttgcaatgtctgcaggaatctgggtagtgggaccaagacaagtgagcctgctctgtgctagccaggtgtcaccaagtttctgatctacccagctctcttgccagaggtgaagggggtcccctcgctgagttgcgtgtttagaggagccctgctaggtgg

SEQ ID NO: 1235 - DNA, 319 bp, Homo sapiens
ccaggggacccggcctcaggtctgtggaggtgcttcaacagcacgatgctcattctctgtccgtagtgtctccatatactttctcatcttctccaccatccaggagggtaggacaaaggatttcaattcctctagcttcagatccaggcatcctctgtaatcatcactggccgcaaggtcccggatgtcctcctcgatgaggaggtaggccatcttgccccctgttgcccgcatgtgatgctgctcagccagccagtgcttatcctgggggtcagacctgcccgggcggccgctcgagccctatagtgagtcgtattag

SEQ ID NO: 1236 - DNA, 234 bp, Homo sapiens
ctgtggccctgactcactggccctgctggcatttattcagcacatattaaatgacgaaggctttgagtcaacaccatcagtgggtaatcaatctggttgccctccccctaccctgagagagctatcctgcccataaactatcaaaggttagttttaggaccacataagtaaacaagtcatttagataaactacatttctgtgtatctatgccctaagcttttaagagaattcag

SEQ ID NO: 1237 - DNA, 395 bp, Homo sapiens
aaacaaaacaaaaaaaaagtttacaaaagaaaaaaagatacagaaaaagaataacttgcttcatatgtcccaaaaagagaaaaaaataaaggggacaatgccaacatgctcaacaataaaggcttctttttcttatttttttaatacaaaatacaagcaaaggatacacatacttaaaacagagctcaggagcagacacgcagtcctggaaacccttcaataaaagcaaagcaggagtttgttttttctttgtctatgcagatacatacagagactgggatatgtaaaaattaagtatcacaaaagaccatcacacgattctaccaatgcatgttgcatctgtaattcacgaacatggtcaacaaaatcatgttcacttcaaccccatttcattt

SEQ ID NO: 1238 - DNA, 400 bp, Homo sapiens
aaatttaaggataagtaaagtgagagtacaacagccccattcttagttaaaaagaaaagaaaaagacaagagcaagccactgccaccacaggtaccagcacttaaatttgtcagcaggctgaccaaagagtggcctgtctgttggcattcatcggacatggcagctcccttcagctctccagtgagtttcaagttcagagcactttcagtccttgtcttgtttatctattactgaagggtttctaggaaggtttagcagtgcttcaattttcttagcatcattctcaggttcatcttcctgtaaactactttcaattttctcagggaggtgctcagtaacttgtagtctgcctttccactcttccagttttagctcatggagtgcctttcgatccttctg

SEQ ID NO: 1239 - DNA, 243 bp, Homo sapiens
aaaaaagtgacattgctttattactattggcaggtggggcctgcatgaggtggttagtgtgctcaggggatgggtgggctgtggagatgatgacagaaaggctggaaggaaagggggtgggtttgaaggccagggccaaggggtcctcaggtccgcttctgggaagggacagccttgaggaaggagtcatggcaagccatagctaggccaccaatcagattaagaaattctgagaaatctagc

SEQ ID NO: 1240 - DNA, 224 bp, Homo sapiens
ggggttcaggatcccaacctatccttgggggtggaggacacaatggaattcataatgctcccgaagtggttttcggcggggatcgtgaattaggtgtccagcgcgtaacacacagacaccatctggttctctgtgtgagaaggagggggttgcagcacacccgtcatgaataccagctctggagcaggacagacaggttcaaagcctggctccaccccgaccag

SEQ ID NO: 1241 - DNA, 576 bp, Homo sapiens
  misc_feature (1)...(576): n = A,T,C or G
ccattttggagtgtgtccattgggtagcaatgtggaaaccaccagggcctttgtggagaaaatggagggggttgagggagtcccaggaggggcttatttgagggcctttgccacttgctcataggcgagctcgatctcctcatcatctggacaggtggaagcgaattcttcccgggcgtaggcattgctcaagtaccgatgcactccccggaaggcctcggggatggtgaatccccggtacttcttacacaccacctgtactatgtgtaactttggcaacaggttgcagttagccagggtgagctcgttgccatccaaaaacttcctctgagagacaccttcatcttcagcactggtttcatccacttcttctgggaggggggatgttaagtaattgtctaaaaccttcagggctttcaggagtcccttctccagattgtcattgagtgctgggtttgaattcttgatgtaggcanaaaaatttggcaaatatgtncancccanaccttgccgggcgggccgntcgaaggcgaaatccacccacttgnggccgtctantggatccaactcgnnccn

SEQ ID NO: 1242 - DNA, 121 bp, Homo sapiens
ctgctgtggtgtcagcgccagtcttggcctcattccgcttggggagtcctgttgaccacgtgcccctgccggtgaaagagtcaggggatggggatgggtgatgtggcggacacagcccacc

SEQ ID NO: 1243 - DNA, 240 bp, Homo sapiens
aaatgaaatttgaaaaccaaatagtaagaaatggaaagagatagttgtaagaatccatttaccaattttacagctaaaaattaaagtgaagtagaaatagcaaaagataacagacaaatatattattttaggtcattaatttatagtgccttatcatcttaagttataaatagaataaggattttgttatataaaaactatcaaaaaagtatcagtgaaaagacatgacctccatgaaat

SEQ ID NO: 1244 - DNA, 314 bp, Homo sapiens
  misc_feature (1)...(314): n = A,T,C or G
cnctcctatagggcgaattgggccctctagatgcatgctcgagcggccgcccgggcaggtgtcgtggttcatctctttcacctgcattttatttggtgtttgtctgaagaaaggaaagaggaaagcaaatacgaattgtactatttgtaccaaatctttgggattcattggcaaataatttcagtgtggtgtattattaaatagaaaaaaaaaaattttgtttcctaggttgaaggtctaattgatacntttgacttatgatgaccatttatgcactttcaaatgaatttgctttcaaaataaatgaagagcag

SEQ ID NO: 1245 - DNA, 569 bp, Homo sapiens
  misc_feature (1)...(569): n = A,T,C or G
ctggtccaggatagcctgcgagtcctcctactgctactccagacttgacatcatatgaatcatactggggagaatagttctgaggaccagtagggcatgattcacagattccaggggggccaggagaaccaggggaccctggttgtcctggaataccagggtcaccatttctcccaggaataccaggagggcctggatctcccttggggccttgaggtccttgaccattaggagggcgagtaggagcagttggaggctgtgggcaaactgcacaacattctccaaatggaatttctgggttggggcagtctaattcttgatcgtcacatattatgtcatcgcagagaacggatcctgagtcacanacacatatttggcatggttctggcttccagacatctctatccgcataggactgaccaagatgggaacatnctccttcaacagcttnctgttgngccaaaataatagtgggatgaagcanaacnagaantanccacctcccttttcacaancttatcatgtntaatataaacttanaatntttgtcaaaaaggaaaaanaaancc

SEQ ID NO: 1246 - DNA, 169 bp, Homo sapiens
ccagaatttccacatgttcacaaaggaagaacttgaagaggttatcaaggacatttaaggaatcctgatcctcagaacttctctgggacaatttcagttctaataatgtccttaaattttatttccagctcctgttccttggaaaatctccattgtatgtgcatttttt

SEQ ID NO: 1247 - DNA, 280 bp, Homo sapiens
aaaaattagcatggcggcacacatcttagctacttggcaggctgaggttccagatctgttgccatcatggccccttcagggtcctgggaaattcctggcttctcctaaatcagggtgaactgggcctccaggatcaggtctggagcaggcccaaatatagtcctggacctgcctggattaggtgccaatgtctgagtctgggctccagatcaactccagaccccaggctggatctggccccatttgagttctgattccccttggagctgggctctgggcc

SEQ ID NO: 1248 - DNA, 577 bp, Homo sapiens
  misc_feature (1)...(577): n = A,T,C or G
aaaagctttatttccccccataatttgcaaatagatttcatgttagttccactggaagttttcttcgtacagttgcctttctcattgactatgctgttggtggggaaaactgctttctcatgaggggaagggttagatttcatagagatgctctgagctaatcacataaacaagagggtttgacctggcagcctctgaggcagtcaaggaggtcaagaaatcctttcagctaaaggcctagtcaggtgggactagttgccaggatcctctctgcagaactgcccaaacgtagctctctttgaccaggaagcctggaagtcagaccatcttctcaggccctgccaaattcccatcctcagtcctgtggcctcatgcgggaacattttatccaagcaaaccactggctttcgccttgaggtccaatgtgcactcttcaccaagtgcaagattgatcttcactccaaagttcaccgttcacacagtttttggcttgtgctttanaagctggctctgcctctnctangaatggnggcatcacagcattggaacacaaagacccagcaagcactggtnggnn

SEQ ID NO: 1249 - DNA, 333 bp, Homo sapiens
ccaggatggtctcaatctcgacctcgtgatccgcccaccttggcctcccaaagtgttgggattacaggcgtgactcaccatgcccagccacttagttttttcttatttccacctttctatcccatagaacactcttttttatcttccctgaaccatattgatgagataaatagggctgggggctgggccccgctggtcactcaacagagtatttcccttggccgagatggaagttttgtcccaatagatgagctgctgagtatcaacaaggtgacatttttctgctacccatttgtgtcctggagacggtggtaccctgaaggcagaggccag

SEQ ID NO: 1250 - DNA, 416 bp, Homo sapiens
aaacatctcacatatacaaaataggtacaatttaatttttctgcttgcccaagaaacaaagcttctgtggaaccatggaagaagatgaaaatgagactggcaaagaacaaatgctgaatctgaagaagaggacaactttgggcaaataatctgcatacttttaattgggaataagatggaaaatatgaatgctaaatcaaattttttaaaaaatacaccacacgatacaactcaatacaggagtatttcttctcaaattcttctagcaccatcaacattcttcaagtatctgaaatactattaattagcacctttgtattatgaacaaaacaaaacaaggacctcagttcatctctgtctaggtcagcacctaacaatgtggatcacactcatgggaaagtgttttgaggtagttt

SEQ ID NO: 1251 - DNA, 223 bp, Homo sapiens
ccacagtgaaaaaggtcatgggtggagagaagcaaagtaggaaggatcatttgaagcacaaacaaatggggaaactgaacagacaatctcagtatcaccacatctgcttcaaaaatagcacaccaactcccttccaaagtgcatcgttacactgcaccatcgtggaagaaatggaagagcaggatggatttggctggctggagtcacatcttggggaagctgg

SEQ ID NO: 1252 - DNA, 447 bp, Homo sapiens
  misc_feature (1)...(447): n = A,T,C or G
ctgccagtgggtgcaagcagacctctactaaacgcaaagtagaggaaatggaagtggatgacttctatgatggaatcaaacggctctataatgaagataatgtctcagaaaatgtgggttctgtgtgtggcactgatttatcaagacaagagggacatgcttccccttgtccacctttgcagcctgtttctgtcatgtagtttcaacaagtgctacctttgagtgtaaactaaggtagactactttgggaatgagaacatgcaaaatcaggaaaggctgtagaaggaaatataccttaacaggctgatttggagtgagccagaaaaaaaaaataaaactctcattatttgtgtggctaattataattcagcgttatttaagcacataaagaccaaaaaaaaaaaaaaaaaaaaattcaaaaaancccnctttttttnccncccccgg

SEQ ID NO: 1253 - DNA, 355 bp, Homo sapiens
ccacccactctttgtcaaagctttgcgggagggggccgtacacgtagtgcttctgccacatgataacgagcgcggtgaaaccgatgaagaacatggcaccgcccacaaccgtcttccactcgttcgagcccctgttcatctcagcaaagctctccttgaacttaatgcgatacaactcgactttctcatccatggagaggctgctccaggaggccttctccttctccttcagtgccttctggctggcagacaggtgcttgacatgggccacctccggcaaggggtggtcacgccgatccatataagctgggagcgaaaagtcttcgctcttcacaacactttcatgagctcgtac

SEQ ID NO: 1254 - DNA, 439 bp, Homo sapiens
aaaatgttttatttcatagctcataaaaaagtatgtatgtacaagactcaagtaaatagaaaggcagctttcaatcacaaatcagtttttcagattttactgtggaagcatatttaatgcacacatttgaatgttacacataaataattttaacgatggagtccaagttctggattttacattagatctgcatatataagacacttgtggtcaaatttcaagattggtaaagccagtttcaagctgcttatattttgagtacaggtttcactattacaaatatatgatgttaaactaacaaactcatgaccttcaaagatgtcttcgtcccacgcacacacatttgtaatttgtgtccatttgctatttcccttcttctataatcttcaaattatatagttatgcattgagttccctatgcatctcacccatctccttt

SEQ ID NO: 1255 - DNA, 486 bp, Homo sapiens
  misc_feature (1)...(486): n = A,T,C or G
aaattcttgcattacacttttctttttaaaccaatcttccaggagattaatcaatgaaatttataagttttatcaacgtataaaatttttttcatcttctgggactcatagaatacaatctgtgtttctgaccagttgaggtagttaaaatagggagggcttttctaatttcgtatttgactatttcagaaagaaaggttatcttttactggtgagcacagtcattgctctgcagatgggctaggattcaaagaatataacacagngttgttatcataaagagtgttgaagtttatttattatagcaccattganacatttttgaaattggaatnggtnaaaaaataaaacanaaagcatttgaattgtanttggtggaacagcntaanaagaganatatccatttttctntgtcaaactatacctgtttccaaacattttgganataaataactgggaattttggcggcccncntggcccntggt

SEQ ID NO: 1256 - DNA, 539 bp, Homo sapiens
  misc_feature (1)...(539): n = A,T,C or G
aaattcttgcattacacttttctttttaaaccaatcttccaggagattaatcaatgaaatttataagttttatcaacgtataaaatttttttcatcttctgggactcatagaatacaatctgtgtttctgaccagttgaggtagttaaaatagggagggcttttctaatttcgtatttgactatttcagaaagaaaggttatcttttactggtgagcacagtcattgctctgcagatgggctaggattcaaagaatataacacagtgttgttatcataaagagtgttgaagtttatttattatagcaccattgagacattttgaaattggaattggtaaaaaaataaaacaaaaagcatttgaattgtatntggtggaacagccaaaaaaagagaagtatcatttttctttgtcaaattatactgnttccaaacatttttggaaataaataactggaattttgtcgggcacttgcactgggngacaagattngaaccaagaggaacgcctattggagctaaaatttttttgttgggatt

SEQ ID NO: 1257 - DNA, 583 bp, Homo sapiens
  misc_feature (1)...(583): n = A,T,C or G
aaatgtgtacaaattcagaggtttaaaaaacttcgaaagtcacagacacagaatttaggaagctgaaggctgagagtctcccttctcacttaatccatgctttattttgcattcctcacaggtaaggaggcagtgcctgttatgctgtggaccaagaccagccccacggagctgatcttcaaaaaaatggaatttactctggcatactcctatgtatgatacctttccaaggccaaatcccaagagaccagcaagtgcaactttgggcaatgatccaaatctagaattagctgccaaataaccttggtagactagtccctgggtgacaagcatgcttacaagagaaaaaggcagagctctcttccagaaactttcttnctgacattctcgcataatctttgagatctctgctctgtggatgtgcagttttgattttggacaaaacaacaggctctgcttgcttgggggtggaaaatgggcatctttatctttggtttcccnaacanacgctgaggccatgatgacttttgncttgctcttcttccagntggttatcctcttcttactcctttgacccatgnnt

SEQ ID NO: 1258 - DNA, 538 bp, Homo sapiens
  misc_feature (1)...(538): n = A,T,C or G
ggcaggtctgtggtacaaatcttggccctctgtgctcagatcttacctcacgttcttcctctattaaatgcatctaagagtgtgtgatggggatggagacaacctattctgggaacccaaaatctatggctctgcattgatttctgtattggaagggtcagtaaattttgtatttctctctgtgtgtctttccattactttactgcagtgaggattttgtgtcatcacgagatgttgaattaatgatagcaggtgatatccttaggaaagactttgtatttcagaaatatgtgaattcaccttttnaagggcataaatccagcttaaccatgaacataatataggacttacatacaattatattccctttttggcaagtggactgattttccaagaatgggttncgatataatttttcaactgaaccagagggtcatggtgacttacatggcagaatgaaaatcaatgtgcacttaataatacaatggaatcagcttttcttngatcactccattccattntanaattcttttctttc

SEQ ID NO: 1259 - DNA, 251 bp, Homo sapiens
aaaatgtttaatttgcaatatacataatactggaattgaaatgctgtctgatggaaatgttgcaatgtggagtaggagggtcaagttcgtgaagatattcttaaaattaatcttggaaactctgtgcctatgaggtttctctaaagtggctaaaatatgcatttaatatgttgtctaaatgagtacatttaattctagagactgtaaggagtagagattatatgctttggggctttttgtagcattttttt

SEQ ID NO: 1260 - DNA, 350 bp, Homo sapiens
ctgcccctccttccacaagtactcaagcctgtttgtaaatactgaaggaattgatggggttgaggaaaggaggtgcatgtgaccagggtcccaaggccacagcttttcagatcctaggaagcaagtggcatttgcttgagttgtggcctcggaaggagaatgtttatctgttttctaactttgctgacaccaggattctccctgtcattgagaagaaagcattatctaattaccttcaggtggtttacttattctgtaaagaatatgtgtaaatattttgtacagagccctgtatcaaataaacagccatatgtggttactaatcacctcttctgtcattccgtccttgg

SEQ ID NO: 1261 - DNA, 435 bp, Homo sapiens
ggacccagttccttaccagcctccctttctctgtcagtggggacgtcatcagccaagctggaagccattaatgaactaattcgttttgaccacatatataccaagcccctagtcttagagataccctctgagacagagagccaagctaatgtggtagtgaaaatcgaggaagcacctctcagcccctcagagaatgatcaccctgaattcattgtctcagtgaaggaagaacctgtagaagatgacctcgttccggagctgggtatctcaaatctgctttcatccagccactgcccaaagccatcttcctgcctactggatgcttacggtgactgtggatacgggggttccctttccccattcagtgacatgtcctctctgcttggtgtaaaccattcttgggaggacacttttgccaatgaactctttccccag

SEQ ID NO: 1262 - DNA, 198 bp, Homo sapiens
ggactgccggtcacacaccagcacgtcccacctcgtgctcacggatttattacacagatagtggcggcaatggcctcagcccagcccaccctcacctgcttttccagcccacaaagggggacgatcacggcccagcaaaagcgatgctgagaggggaaacagtccagagtccaacagcagaacttgggggaagcggtc

SEQ ID NO: 1263 - DNA, 176 bp, Homo sapiens
tgggcattgtgggctacgtggaaacccctcgaggcctccggaccttcaagactgtctttgctgagcacatcagtgatgaatgcaagaggcgtttctataagaattggcataaatctaagaagaaggcctttaccaagtactgcaagaaatggcaggatgaggatggcaagaagcag

SEQ ID NO: 1264 - DNA, 245 bp, Homo sapiens
  misc_feature (1)...(245): n = A,T,C or G
ctgtggaggagggtttcagaggagagaggtcggagagcagaggcctgagaagccagaggcaggtggagagagggtggaaagtgagcagcgggctgggctggagccgcacacgctctcctcccatgttaaatagcacctttagaaaaattcacaagtccccatccacnaaaaaaaaaaaaaaaaaaaaaatttncggggannaaaantaanttttaanaaaaaggnaccccntnccnggggggcct

SEQ ID NO: 1265 - DNA, 469 bp, Homo sapiens
ctgaagatagatcgccatcatgaacgacaccgtaactatccgcactagaaagttcatgaccaaccgactacttcagaggaaacaaatggtcattgatgtccttcaccccgggaaggcgacagtgcctaagacagaaattcgggaaaaactagccaaaatgtacaagaccacaccggatgtcatctttgtatttggattcagaactcattttggtggtggcaagacaactggctttggcatgatttatgattccctggattatgcaaagaaaaatgaacccaaacatagacttgcaagacatggcctgtatgagaagaaaaagacctcaagaaagcaacgaaaggaacgcaagaacagaatgaagaaagtcagggggactgcaaaggccaatgttggtgctggcaaaaagtgagctggagattggatcacagccgaaggagtaaaggtgctgcaatgatgttagctgtgg

SEQ ID NO: 1266 - DNA, 547 bp, Homo sapiens
  misc_feature (1)...(547): n = A,T,C or G
ctgctcggtccagagtaggcttgcgagactgcattctctggatgtcccaatagataacctcaaggagcttggcgtcaggaagcaattgccctcagcaaaccttctggggcaggcacagtcatgagtttgcccacattctgtattcatgataaacagtttgctgtttgatcgtatagactcagtggaatgttggtcacgtcccatgggcctttggctctctgtatatcctcctttctgtttatgtattaattgaaggagtgtaaggccagggtgggcagctctcattttcccattggtggtccatccaactttacagactgtccctggtgctccagtagtttctcagcctcctgtgtggttttcttganttgtccccangttatgggggttgatgtcatgactgnggncggccttctctccgtcttcgcactcangctcagacctgnccgggcggcccgtcgaaaagggcgaattccagcacacttgngggccgttactantggatntctanctngggtccaanttngccgnaatnatnggncataaa

SEQ ID NO: 1267 - DNA, 525 bp, Homo sapiens
  misc_feature (1)...(525): n = A,T,C or G
ctgctcggtccagagtaggcttgcgagactgcattctctggatgtcccaatagataacctcaaggagcttggcgtcaggaagcaattgccctcagcaaaccttctggggcaggcacagtcatgagtttgcccacattctgtattcatgataaacagtttgctgtttgatcgtatagactcagtggaatgttggtcacgtcccatgggcctttggctctctgtatatcctcctttctgtttatgtattaattgaaggagtgtaaggccagggtgggcagctctcattttcccattggtggtccatccaactttacagactgtccctggtgctccagtagtttctcagcctcctgtgtggttttcttgagttgtccccangttatgggggttgatgtcatgactgtggtcggccttctctccgtcttcgcactcagctcanacctgcccgggcggccgctcnaaagggcgaattccancacacttgncggccgttactatggatccnagctcgnaccaancttggct

SEQ ID NO: 1268 - DNA, 360 bp, Homo sapiens
ctgattaatcattgttgatgactgcagtttttcccatccttcccgatttacatctgttcaggccaattcaaatatggtgagtaaatgaattagacatgcaaattcaagccccaggctagaaagagggagagagaggaaaagagagagaaagagagagagcgcgcgcatggctgaaatcctaggcgagaagaaagattcttctgcctgatagttattttaatgctctaaaaatcctgcaaatcagaccttcctgtcccttgcaggataactgtaaggctttttaatgtaaggaggcttctggaggaagtgaagagctatggaaacaacacacatagtgtggaaaaatttcacatttttttt

SEQ ID NO: 1269 - DNA, 83 bp, Homo sapiens
ccaattcttcttctcccccccacccaaagacatgtgagcaactgctaatgaaaagcagtaaacagccgcttaggctatagcag

SEQ ID NO: 1270 - DNA, 293 bp, Homo sapiens
  misc_feature (1)...(293): n = A,T,C or G
cattattagagcaggaagtacaagcatttaaaatatgtagttcccatatatttcagggtctctgtgtattaagctaactcagatgttttgaaagctttttctttaaacagaggtgaaatatctgtggctaaaaagtttgagatttgtgataactttgtagtcatgtaaaacttaagtgcttcatgcctctccaaatgtggttattctaataaatggagaaatgagctaaaaaaaaaaaaaaaaaaaaaaaancccnccccggggggcccntcaaagggggaaatnccnccccc

SEQ ID NO: 1271 - DNA, 267 bp, Homo sapiens
ctgcaaggggtcaacagctagaatcacgcctttctgaagggcagagtatgctgtaaccacaaacttctaattctgggttctgcaccatcaggaagagaatatcctacaggacagttctccttgtatactgcataaaggactagaatgtggattcatttctgcttgctttttgatccttatggtcctttatgctggcctcaaacttgtcaagcacatgttggcagacattcatgagctcattcaggcctctctgaaatggctcaacag

SEQ ID NO: 1272 - DNA, 580 bp, Homo sapiens
  misc_feature (1)...(580): n = A,T,C or G
attccacttgggagggtcaggctgtggccttctggagcaggtggcttgttaaggaacgctagcagggcatggcacgtgagctccggaatagatgtcttcatcacttcttccactgtgtgttgacactgttttccttacctatttcctcagatccccagctttctcctctgctatgcattttcttcacagtgcagcttgcagtccgttgctgaaaatgattataagccctgcataatgttaagctttattgtgattacgtgtatgtttcttctttcttttaagcagacccatacctttccagggtcaaagtacagaatagaatacattgatacaaagtacagaaaaatactttgatttttatccatttcttttactctgtgtaaagactttagaagtctaattcacaggcaaaccaatacagaattgactgcagttgaacagactanaagtatttgtgggaggagtgacatgaagcatgagttatctgattttttttgtagctgctatatattttaagccttcatttgcaattcattgtaacagtgtgtcataaatacacaataaanccatcctgttcaat

SEQ ID NO: 1273 - DNA, 575 bp, Homo sapiens
  misc_feature (1)...(575): n = A,T,C or G
aaaataacttaaaaattattgagagtagattttaactattctgcatattattttctttgtgatatatgcatcttctgtcatcttccatgggaaatttgacattgcaacctcacctgaggccatcactttttccttgatgctacgaaccatcctgtcatgtgtttgtaccatatcagtagtgaaactgacagtgctctgataggggtatactcttttatcccaatctatatcccaatacccaatagcccagtattcttagaatccagttgtattcatactctcctggatcatttctgttcctttgtaatatagtccctttcttcccttacaggctcatatgacattaacagacaagacacttttcagaaagacaggtaagtcatttgttaaaatctcactactgttgtttaacagaaacatatatatgcatgtatatgtgtgtcagtatggaaaaagtgggattagangtttatctagaaaagaaaaaattacctctctaagtgcagaaatgaataatacttaaaccatacctacaattctctttatatttcccanataagtcaaaattaaaaaan

SEQ ID NO: 1274 - DNA, 216 bp, Homo sapiens
aaatactgtgtaaaaactttttttacacctaagctgtgtttttgatactgatattttcctatgctgaatagttttcttactttcagggaaggtaagaaaatactttttttatatttgttacttatgtaacattcatatttttctcattttgatatttgtaacatactgtatgctttctacttgtaaatgtcaacaatagaattaaaatatttattt

SEQ ID NO: 1275 - DNA, 74 bp, Homo sapiens
aaattttatttcaaaagcttggatagcttcaatatccaggttgtggcaaaatcaggacacgtgtaaaatacctt

SEQ ID NO: 1276 - DNA, 276 bp, Homo sapiens
aaagtgtttatttttttctataatacatttcattcaaatcataaaagtctgatacatttttttctcaagaacaacttacactcatttgagatgctttttctttcctttaatcttataggatggacaaagatacactttaatggacaaaaaacaccagagttcattacaaatacagcttcccaggccccacctccagcacttctgactgagcgtctgggacgcatcctaggatcgcaaaactgtaaaattcccccagtcaactccacggcaggcagg

SEQ ID NO: 1277 - DNA, 370 bp, Homo sapiens
ccaggctggtgtcgaactcctgggctcaagccattgcccacctcaaagtgctgggattacaagtgtgagccaccacacccaaccaggttatttgaacatttttaagtactgtattttctctattgtaatattgactgtcatctctgtgcaggttttttagtggttgctctaggttgaaacgctttgaattcttaggtatctaagagtgagcattttctttttttgactgctatactctcaccagttgccagcttctcatataaatattgtaaatgctctcgtttaggtaactcagcttctggagttgagggaacttcaaaatcagaagagctctgggaatctgcatttgtgctaagatttagcaaacttt

SEQ ID NO: 1278 - DNA, 586 bp, Homo sapiens
  misc_feature (1)...(586): n = A,T,C or G
agaagatcaaacagcgactgtttgagaaccttagaatgctgccgcacgcacctggggtccaaatgcaggcgattcctgaggacgccatccctgaggagagtggcgatgaggacgaagacgaccctgacaagcgcatctcgatctgctcctctgacaaacgaattgcctgtgaggaagagttctccgattctgaagaggagggagaggggggccgcaagaactcttccaacttcaaaaaagccaagagagtcaaaacagaggatgaaaaagagaaagacccagaggagaagaaagaagtcaccgaagaggagaaaaccaaggaggagaagccanaagccaaaggggtcaaggaggaggtcaagttggcctgaatggacctctccagctctggcttcctgctgagtccctcacgtttcttccccaacccctcagattttatatttnctatttctctggggaattnatataaaaatttattaaatataaatatcccccagggacagaaaccaaggcccccagctcagggcagacctgcccggcgggccgttcnaaagggcgaattcagcaccnttncggccgttctnng

SEQ ID NO: 1279 - DNA, 576 bp, Homo sapiens
  misc_feature (1)...(576): n = A,T,C or G
agaagatcaaacagcgactgtttgagaaccttagaatgctgccgcacgcacctggggtccaaatgcaggcgattcctgaggacgccatccctgaggagagtggcgatgaggacgaagacgaccctgacaagcgcatctcgatctgctcctctgacaaacgaattgcctgtgaggaagagttctccgattctgaagaggagggagaggggggccgcaagaactcttccaacttcaaaaaagccaagagagtcaaaacagaggatgaaaaagagaaagacccagaggagaagaaagaagtcaccgaagaggagaaaaccaaggaggagaagccagaaccaaaggggtcaaggaggaggtcaagttggcctgaatggacctctccagctctggcttcctgctgagtccctcacgtttcttccccaacccctcagattttatattttctatttctctgggtatttatataaaaatttattaaatataaatttcccagggacagaaaccaagccccgagctcanggcaacctgcccggcggncgttcgaaaggcnattccacacactnggnccgtnctang

SEQ ID NO: 1280 - DNA, 668 bp, Homo sapiens
  misc_feature (1)...(668): n = A,T,C or G
ccacccctatggnacagggccttgagggagggtgagtgtggnggcggtcttacgtgttcttctcatacctggcaaacagagtgagcacaagccgctggaagccaagcgggaaggcacatctagaagggcagtgagctctggaatgctacaggcacgtgtggatggatgaggctccatggcggccaaggagatatctgctcctgagtaaggtcacctgaccacagacagcaccaggggctggggggctaagaaggagatcttganaaggatggacctgagctaaagatgtaacttagatggtgatctgaaaaaaggaaaaaagaataaacgctggaactcaaatccactgtttagggtacaggagtacacagctaagttccaggtatccagaatcttgtgtccaaatcatagcacaaggagaacaggaattctcttgagttaaggcaaaatcaatcttcacccatctgggctcttccattgcatggtttggaaaggaagggctgggcagagatcattcctctncccatctncccaccttgcccgggcgggccaanggccnaattccanccccacttggcggggccggttacctantgggaatnccnaaccttcggtnccccaaaacctttgggcngtnaattcatngggccattagctggtttccctgt

SEQ ID NO: 1281 - DNA, 402 bp, Homo sapiens
aaagtgacttttagcactaaaatgcctagaagattttactccagacctataaggaaatgtttagtttttatgaaaaatgacaagtcgatggttaaacttctcatgtctttggtgctttggccctaatagcactggacaacaccacgaccacatggaaacatatttttggaagcaaaactttaattttatataacgtatgctatggagagctaagacaatttaaggactacttgttttctattttttttcttaataaaatggaatccactgtgttgaagactcttgatatcatgtgcttgtctaaccattttttgttttataaattagaataaaatatagttgtgataatggcatcgaatggatttgtttggaaagctacatcttatttgtgaaatgtttttt

SEQ ID NO: 1282 - DNA, 143 bp, Homo sapiens
  misc_feature (1)...(143): n = A,T,C or G
ctgaggccaaggagtgaaaaacctattactactaagagaaggggtgcagagtgtttacctggtgctctcaacaggacttaacatcaacaggacgtaaaaaaaaaaaaaaaaaaaaaagnntgattccantaaaananttgtgg

SEQ ID NO: 1283 - DNA, 361 bp, Homo sapiens
caattttgctaatagtggcttattcacagatataaataaagtattagcataaatcgtagccttaaaaaagccttttatatgtccttttatatagaattttacatggtcttcaaagaatagtatgtaattgagaaaaagattagaagggaatatgtagaaatagaaagaattatgttagagtgataggattatgtaattttttcttagtattttctcagttcatcaaactttctattataccctgattatactgattatattacctcctacgctgactcaaaatctttttttttcccctcaggtggcgacatgtctaagaatgtgagccagtcacagatggcaaaattgaaccaacaaatgg

SEQ ID NO: 1284 - DNA, 403 bp, Homo sapiens
aaagtgacttttagcactaaaatgcctagaagattttactccagacctataaggaaatgtttagtttttatgaaaaatgacaagtcgatggttaaacttctcatgtctttggtgctttggccctaatagcactggacaacaccacgaccacatggaaacatatttttggaagcaaaactttaattttatataacgtatgctatggagagctaagacaatttaaggactacttgttttctattttttttcttaataaaatggaatccactgtgttgaagactcttgatatcatgtgcttgtctaaccattttttgttttataaattagaataaaatatagttgtgataatggtcatcgaatggatttgtttggaaagctacatcttatttgtgaaatgtttttt

SEQ ID NO: 1285 - DNA, 105 bp, Homo sapiens
caagttttatgatttatttaacttgtggaacaaaaataaaccagattaaccacaaccatgccacctgcccgggcggccctcgagccctatagtgagtcgtattag

SEQ ID NO: 1286 - DNA, 189 bp, Homo sapiens
aaattattatttatagaaagaatctataaattcttggggaagtgtgttataagctttaataattacattgagctgcacctcagtggtgtgtcattaacatgcagtggggttaatatctgaggcctcagatgactttgtgccttttggaataaagggtaaaataaactctcccagagtaagagctgtatc

SEQ ID NO: 1287 - DNA, 568 bp, Homo sapiens
  misc_feature (1)...(568): n = A,T,C or G
aaaaacactacttttgcttttttatttaccttttaagacattttcatgcttccaggtaaaaacagatattgtaccatgtacctaatccaaatatcatataaacattttatttatagttaataatctatgatgaaggtaattaaagtagattatggcctttttaagtattgcagtctaaaacttcaaaaactaaaatcattgtcaaaattaatatgattattaatcagaatatcagaatatgattcactatttaaactatgataaattatgataatatatgaggaggcctcgctatagcaaaaatagttaaaatgctgacataacaccaaacttcattttttaaaaaatctgttgttccaaatgtgtataattttaaagtaatttctaaagcagtttattataatggtttgcctgcttaaaaggtataattaaacttcttttctcttctacattgacacacagaaatgtgtcaatgtaaagccaaaaccatcttctgtgtttatggacctgcccgggcgggcgctcgaaagggcgaattncagcacactggcgggcggtactantggat

SEQ ID NO: 1288 - DNA, 248 bp, Homo sapiens
aaaaggtttctttataatgaaaaggttaaaatagctactctgctaccacatcgtccagcagttccacctttagggtcttgaagagatatttgtacacccatgttcacaggagcattattcacaatagccaaaggatggaagcaacattggtgtccatcgacagaccatggataaacaaaacatggtatagacatccaatgaaatattattcagccttaaaaaagaagaaaattgacacatgctacaac

SEQ ID NO: 1289 - DNA, 322 bp, Homo sapiens
aaaccaatcttccaggagattaatcaatgaaatttataagttttatcaacgtataaaatttttttcatcttctgggactcatagaatacaatctgtgtttctgaccagttgaggtagttaaaatagggagggcttttctaatttcgtatttgactatttcagaaagaaaggttatcttttactggtgagcacagtcattgctctgcagatgggctaggattcaaagaatataacacagtgttgttatcataaagagtgttgaagtttatttattatagcaccattgagacattttgaaattggaattggtaaaaaaataaaa

SEQ ID NO: 1290 - DNA, 339 bp, Homo sapiens
cttacataatctttgttttgatatcacagttgtctaattattttactttgtagcttaaggcaggctgaattgttgataaaatggaaaaagtagtatattgttatataagcttctgaggtgtgttttgttgtataagccctggaggttaaaaagtcatcccttatgtatagtagttaaaggcataaaactgtgacttttagatattccacagaaccagacttatttgatgtggataataaccaatgatttagcattttgtttgcttttgttttattttatccgggttcattttttactcttcccatgcacatgaaacaggtggtggcgtgtagagatcag

SEQ ID NO: 1291 - DNA, 189 bp, Homo sapiens
cccgcctcggcctcccaaggtgctgggattacaggcttgagccactgcgcccggccactgctttctctttaagctcctttagaacaaagctgctgtcaaggctcactttcatcagcccctaggacatcccaccagaatagctctccacctccctgcctgttctagtccccaagtccccactgcctgcag

SEQ ID NO: 1292 - DNA, 347 bp, Homo sapiens
  misc_feature (1)...(347): n = A,T,C or G
ctgttggaccggcacatttctatgccacaaatgaccactacttctctgatcctttcttaaagtatttagaaacatacttgaacttacactgggcaaatgttgtttactacagnccaaatgaagttaaagtggtagcagaaggatttgattcaggaaatgggatcaatatttcacctgatgataagtatatntatgttgctgacatattggctcatgaaattcatgttttggaaaaacacactaatatgaatttaactcatttgaaggtcttgagctggatacactggtggataattaatctattgatccttcctcggnggacatctgggtaggctgtcatcctaatg

SEQ ID NO: 1293 - DNA, 516 bp, Homo sapiens
aaacagatggagttactgtgaagaagttttcacaactatttatgctggtaaaacaaatgctgttaaatcaccttatgcgtcgttttcaacagcagtggggctaattacccggaatacggtctcaccgatgcagttttcatggacatagaaaattcaaatagaatatataatattgaatttaagatttggggggttaaaaaagaaaacttaactttataaaattatttattctattttaagccttctatcatattttcccatccaattgtttggtttcagtggtccagctttatttacaggcatataaaatgaaattgtgagatgttttgcaagcttctttttactttgagtagcttttaatttgtatgtttttatgtggatgaagagcattttttatgcttttgtgcaataggttccaatatgcatttattagacatctgtttaaatggtaatgtagcatttattttgctaaattgtaagggaacatagatggaattccaaaatatgtacattcag

SEQ ID NO: 1294 - DNA, 157 bp, Homo sapiens
  misc_feature (1)...(157): n = A,T,C or G
aaacatctcacatatacaaaataggtacaatttaatttttctgcttgcccaagaaacaaagcttctgnggaaccatggaagaagatgaaaatgagactgacaaagaacaaatgctgaatctgaagaagaggacaactttgggcaaataatctgcata

SEQ ID NO: 1295 - DNA, 473 bp, Homo sapiens
aaaaaaaacccaaaaattaatggctcaagatactacattgctaaagttaggggaaaaaagtaaaaaggctgtgagttctgttgcaagagctcatttgtagacttgcaaaatctaactaattttatattatgcttgttgttagagcagtgctcaaaattacagaagcttcaaattgttatgttttcacaaaatttgctacatatgttgacatgaatgtgtgtcagggaattcatacccaggtaaatgacaattacatcagtatagctaatttttgccaccttgggaggaatggaattctgcctattttcgaattaatcctacagcactcgctaaaaactaacagccatggcaccataatacattttgtgaggtcctagaatattactaatggaaacaaaaaatgtgaggtaaaccgacctttccccaagaaactttgaagccagaaattttacctgcccggggcgggccgctcg

SEQ ID NO: 1296 - DNA, 652 bp, Homo sapiens
  misc_feature (1)...(652): n = A,T,C or G
gctnctacttaanaatgcttcttcctcccccactncttcacttaaggtataagtctacccctaaagtgcatttctcaggcattaaaaacagcactgtgatttgctttccacagagtcctaaataacagccaccttcttcatttgagaggctacagagttcaagctgagctgtgacaggagccagggggccagggccccagaatagctttttgaaaaaaaataattatgccaccctcctccgcggcaggtatcttctcttaccacaaataaatatttaatgcatccttggagtcatgaaatattgagaacccaattgacacttcaatttccagaaaaataaaatcatgaaggcatngtgtaaatattctgaatttggtggaatgagacaacgcgtaagggggcgggcctgaagtctcgggtttggaactgggggtttggggtantgctgggtangcaagtcctggaacncncaggctataccttgcccnggcggcccgctcgaaccctatagtgagtcgtatttaanaaanggcgnaattcccaaccaccacttggcngggccggtttacctangtnngaatcccnaanccttcnggnnacccaaaagcnttngggcgntaaatcattggggncattaancttggttttccct

SEQ ID NO: 1297 - DNA, 324 bp, Homo sapiens
ctgtaggattgccagatttagaaaaaccaaacaatgagaaaaaccagcatgctcagttaaatttgaatttcagacaaacaatgaatgcttttactgtaaatatatgccaaatattgcatgaaacattcttaacgtgaaattgtttctctgaaattcaaacttaactgggcatcttgtacttgatctgacaatcctacaaatagataaatacaaaaaagaaaggagagggggttgtaacccctgccactgttgggtcacacagagactaaaaataaaaacaacacgaataatgaaccaaagagtcactacactggttgctcacac

SEQ ID NO: 1298 - DNA, 567 bp, Homo sapiens
gagaaaggcatgaagtctaccttcaaattcatggcattttagaaggaaaaattgtcgcaagtaatgtgattatacttcctagttttataggtcagaaaaatgaggtccacactaattttgcctcttccacagggagatagattctcatctaccattgtgtcttttgtttctgtttttgtcatgatacctcaaattgatatatgttgtaattatgaatttaaggaagtaaaaaaataactcagggctggagccttcagccatattaacatacattgacataaagacctttgttttaatatgaatgattccagttaacaaatggagaaatagttgtttgaaaattaatatttagcttctcaaaagagactcctgtttggaagcaaattgttggtttaacaggacatactttagatatttgaaaaattctctgtggaatcacaatctcttatttttaagaatgtaggaatatgtgttctatatgcttttaagttatgtattacatactattctctaaaatagaaatgtttatttggcttctaaaaagtcatttgtgagttgatgttattt

SEQ ID NO: 1299 - DNA, 783 bp, Homo sapiens
  misc_feature (1)...(783): n = A,T,C or G
gctccaccgccggcgcagcagggaaaggcaaaggcaaaggcggctcgggagattcagccgtgaagcaagtgcagatagatggccttgtggtattaaagataatcaaacattatcaagaagaaggacaaggaactgaagttgttcaaggagtgcttttgggtctggttgtagaagatcggcttgaaattaccaactgctttcctttccctcaacacacagaggatgatgctgactttgatgaagtccaatatcagatggaaatgatgcggagccttcgccatgtaaacattgatcatcttcacgtgggctggtatcagtccacatactatggctcattcgttacccgggcactcctggactctcagtttagttaccagcatgccattgaagaatctgtcgttctcatttatgatcccataaaaactgcccaaggatctctctcactaaaggcatacagactgactcctaaactgatggaagtttgtaaagaaaaggatttttcccctgaacattgaaaaaagcaaatatcacctttgagtacatgtttgaagaagtgcccgattgtaattaaaaattcacatcttgatcaatggtcctaatgtgggaaccttgaaaaagaaagtcangaccttcgggccgngaaccaccncttaangggcgnaatttccanccaccacttgggcggggccggttaccttagtnggaattcccnanccttcnggtaccccaancctttggggcggnaaaatcatttgggncattanncttggttttcccctgggg

SEQ ID NO: 1300 - DNA, 324 bp, Homo sapiens
agaacatacagttgagtgggagtaaacaaaaagataaacatgcatgttaatggctgttcgagagaaatcggaataaaagcctaaacaggaacaacttcatcacagtgttgatgttggacacatagatggtgatggcaaaggtttagaacacattattttcaaagactaaatctaaaacccagagtaaacatcaatgctcagagttagcataatttggagctattcaggaattgcagagaaatgcattttcacagaaatcaagatgttatttttgtatactatatcacttagacaactgtgtttcatttgctgtaatcagttttt

SEQ ID NO: 1301 - DNA, 735 bp, Homo sapiens
  misc_feature (1)...(735): n = A,T,C or G
ctggcattccttcgacttctctccagccgagcttcccagaacatcacatatcactgcaaaaatagcattgcatacatggatcaggccagtggaaatgtaaagaaggccctgaagctgatggggtcaaatgaaggtgaattcaaggctgaaggaaatagcaaattcacctacacagtnctggaggatggttgcacgaaacacactggggaatggagcaaaacagtctttgaatatcgaacacgcaaggctgtgagactacctattgtagatattgcaccctatgacattggtggtcctgatcaagaatttggtgtggacgttggccctgtttgctttttataaaccaaactctatctgaaatcccaacaaaaaaaatttaactccatatgtgttcctcttgttctaatcttgcaaccagngcaagtgaccgacaaaattccangttatttatttccaaaatgtttggaaaacagtataatttgacaaagaaaaaatgataccttctctttttttttgctgttccaccaaatacaattcaaaangcttttttgntttatttttttacccaattncaatttcaaaaatgtctcaatgggggctataataaaataaaacttnacacttnttttattnaaaacaaacactgggggnnatattccttngaaatncctaancccaatcttgcnaaaancnaatgacctggggnttnacccaanaaaaaaaaanaaccctttt

SEQ ID NO: 1302 - DNA, 199 bp, Homo sapiens
aaattatataattttagtgaatcaaagacttataaaattacaattttggttttcacaacatagaaaaaatacaaaaatgactatatatacggttgtacaattttttacccaaatttcaaaggagcagtatgtattgaatttaatgttttataatgttttatctgaaactcagaactgcaagtaatttgcaggttgtacc

SEQ ID NO: 1303 - DNA, 336 bp, Homo sapiens
  misc_feature (1)...(336): n = A,T,C or G
ctgggcgatgtgcgagctgatagtgagcggcagaatcaggagtaccagcggctcatggacatcaagtcgcggctggagcaggagattgccacctaccgcagcctgctcgagggacaggaagatcactacaacaatttgtctgcctccaaggtcctctgaggcagcaggctctggggcttctgctgtcctttggagggtgtcttctgggtagagggatgggaaggaagggactcttacccccggctcttctcctgacctgccaataaaaatttatggtccaaggaaaaaaaaaaaaaaaaaancctncccgggnggccgntcaangggcaanttcca

SEQ ID NO: 1304 - DNA, 444 bp, Homo sapiens
ctggaagccaacttgctggcacccccgctccccaacccttcttgcctgggtaggagaggctaaagatcaccctaaatttactcatctctctagtgctgcctcacattgggcctcagcagctccccagcaccaattcacaggtcacccctctcttcttgcactgtccccaaacttgctgtcaattccgagatctaatctccccctacgctctgccaggaattctttcagacctcactagcacaagcccggttgctccttgtcaggagaatttgtagatcattctcacttcaaattcctggggctgatacttctctcatcttgcaccccaacctctgtaaatagatttaccgcatttacggctgcattctgtaagtgggcatggtctcctaatggaggaagtgttcattgtataataaagttattcacctgagtatgcaataaaga

SEQ ID NO: 1305 - DNA, 451 bp, Homo sapiens
  misc_feature (1)...(451): n = A,T,C or G
aaaattcacggcaccatggaaatgtagctgaacgtctccagtttccttctttggcaacttctgtattatgcacgtgaagccttcccggagccagcgagcatatgctgcatgaggacctttctatcttacattatggctgggaatcttactctttcatctgataccttgttcagatttcaaaatagttgtagccttatcctggttttacagatgtgaaactttcaagagatttactgactttcctagaatagtttctctactggaaacctgatgcttttataagccattgtgattaggatgactgttacaggcttagctttgtgtgaaaaccagtcacctttctcctaggtaatgagtagtgctgttcatattactttggttctatagcatacttgcatctttaacatgctatcatagtacatttanaatgattgcctttgatttttttttt

SEQ ID NO: 1306 - DNA, 365 bp, Homo sapiens
caaatggtcattgatgtccttcaccccgggaaggcgacagtgcctaagacagaaattcgggaaaaactagccaaaatgtacaagaccacaccggatgtcatcttcgtatttggattcagaactcattttggtggtggcaagacaactggctttggcatgatttatgattccctggattatgcaaagaaaaatgaacccaaacatagacttgcaagacatggcctgtatgagaagaaaaagacctcaggaaagcaacgaaaggaacgcaagaacagaatgaagaaagtcagggggactgcaaaggccaatgttggtgctggcaaaaagccgaaggagtaaaggtgctgcaatgatgttagctgtgg

SEQ ID NO: 1307 - DNA, 263 bp, Homo sapiens
aaaaaaaatgtggaggaaagtagaaatttaccaaggttgttggcccagggcgttaaattcacagatttttttaacgagaaaaacacacagaagaagctacctcaggtgtttttacctcagcaccttgctcttgtgtttcccttagagattttgtaaagctgatagttggagcatttttttatttttttaataaaaatgagttggaaaaaaaataagatatcaactgccagcctggagaaggtgacagtccaagtgtgcaacag

SEQ ID NO: 1308 - DNA, 141 bp, Homo sapiens
  misc_feature (1)...(141): n = A,T,C or G
ctgtggccctgggggcaggtgggctctgaggctgcaaacaccctgagtgccagtggtcccagagggggtgaggcctctatctgtacctttattncagccagcctcctggcacagggctgggcccacatcctggcctctgca

SEQ ID NO: 1309 - DNA, 230 bp, Homo sapiens
taggaacacgaagcacgatcagtccatcccagagggaccggagttatgacaagctttccaaatattttgctttaccagccgatatcaacacttgtatctggcctctgtgccccagcagtgccttgtgcaatgtgaatgtgcgcgtctctgctaaaccaccattttatttggtttttgttttgttttggttttgctcggatacttgccaaaatgagactctccgtcggcag

SEQ ID NO: 1310 - DNA, 293 bp, Homo sapiens
  misc_feature (1)...(293): n = A,T,C or G
ctgattttatttccttctcaaaaaaagttatttacagaaggtatatatcaacaatctgacaggcagtgaacttgacatgattagctggcatgattttttcttttttttcccccaaacattgtttttgtggccttgaattttaagacaaatattctacacggcatattgcacaggatggatggcaaaaaaaagtttttttgtacaagcttttttttttttttttttttttttttnaaaaaaaaaaccncccnggggggcccttnaaaggggnaantcccanccccnngggggcg

SEQ ID NO: 1311 - DNA, 447 bp, Homo sapiens
  misc_feature (1)...(447): n = A,T,C or G
agaaaaagaaggattgatcagagcattgtgtaatacagtttcattaactccttcccccgctcccccaaaaatttgaatttttttttcaacactcttacacctgttatggaaaatgtcaacctttgtaagaaaaccaaaataaaaattgaaaaataaaaaccataaacatttgcaccacttgtggcttttgaatatcttccacagagggaagtttaaaacccaaacttccaaaggtttaaactacctcaaaacactttcccatgagtgtgatccacattgttaggtgctgacctagacagagatgaactgaggtccttgttttgttttgttcataatacaaaggtgctaattaatagtatttcagatacttgaagaatgttgatggtgctagaagaatttgagaagaaatactcctgtatngagttgtatcgtgtgggggtatttttt

SEQ ID NO: 1312 - DNA, 277 bp, Homo sapiens
ccacagttgaggggaactttgccagcattgatgaacggatgaagaagctgggaaagtgagcacatttgggagctggagaacaggggttatccctacccctgtgaactctgttaacagcttacatagggtttcccctttactataactctagcatccccatcccatttgacactgggggcaagggttcttcttgcatgtggggtttatacccctcccctgatgaatacagagtggtagctaggggttggttatcatcagaaggtggtctcccctcagg

SEQ ID NO: 1313 - DNA, 365 bp, Homo sapiens
ctgccgtgccatatcctgcttggcccgctgcagggcggcttccagctcctcctgcttggcacgagcatccttgagcgccagctccccacgctcctcagcctcggcaatggcggcctccaacttggcacgctggttcttgatgttttcgatctcagcctgcagcctctggatggcccggttcatctctgaaatctcattccgggtattccggaggtcgtccccatgcttcccagcctgggcctggagggcctcaaacttggtctggtaccaggcttcagcctcagcccggctgcatttggccatctcctcatactgcgccttgacctcagcgatgatgcccgtccaggtccagggagcgactgttg

SEQ ID NO: 1314 - DNA, 419 bp, Homo sapiens
  misc_feature (1)...(419): n = A,T,C or G
gantcacaaatgatnatacttaagtgagcaaaaatgacaagttttactagctaagtagagaaataaatctcagatgcagcgctacaattttcattatcttaagcacattgtacatttctacagaacctgtgattattctcgcatgataaggatggtacttgcatatggtgaattactactgttgacagtttccgcagaaatcctatttcagtggaccaacattgtggcatggcagcaaatgccaacattttgtggaatagcagcaaatctacaagagaccctggttggtttttcgttttgttttctttgttttttcccccttctcctgaatcagcagggatggaaggagggtagggaagttacnaattactccttccagtagtagctctgaagtggcacatttaatatcagtttttttt

SEQ ID NO: 1315 - DNA, 374 bp, Homo sapiens
ccaccaattggatccaggagaaagtgtggctctctcaggaggtggacaaactgagagtgatgttcctggagatgaaaaatgagaaggaaaaactcatgatcaagttccagagccatagaaatatcctagaggagaaccttcggcgctctgacaaggagttagaaaaactagatgacattgttcagcatatttataagaccctgctctctattccagaggtggtgaggggatgcaaagaactacagggattgctggaatttctgagctaagaaactgaaagccagaatctgcttcacctctttttacctgcaatacccccttaccccaataccaagaccaactggcatagagccaactgagataaatgctattta

SEQ ID NO: 1316 - DNA, 341 bp, Homo sapiens
  misc_feature (1)...(341): n = A,T,C or G
ccaaatcaggtcataggattcctttttttttttaaanataagtaaatgcatccanaaatgtatgcacanatttaagttttccccatagttttatctgctaggngatagggnggagcttcttagtgcttctgctgggaattcanataggacanacttgcagcctcanaggacacactgcaggtagtgcaaanagacatggaaggaaaacacactgcctgctacatagtttttatcccaggtataatttgtgaggaatgtatagcaaatgtttcttaaagcatgaatcctcttcttgaattcttgtttttatgaaagccatccaactacttactcaatcctct

SEQ ID NO: 1317 - DNA, 311 bp, Homo sapiens; identical to SEQ ID NO: 794

SEQ ID NO: 1318 - DNA, 345 bp, Homo sapiens
aaatataatttaagaacccctccaagcaccggcgtccgtttctgggttccaccaccaactaccgcccttttcactacctcaccccacaccccttcataggacacagcttgggggtcccaggcggggtccggggatgtgggatgaccaaggcactgttctggaaacagacatgatgatgggcccctgtttcaacttgggcaaaggaggccatagtgaaacaggttccctccaacacaaagttatgacaaggacggtagaaaaacaaaacgaagaaacaaaaagggaacggggagaaaaattaagaccaaaaacaaaactcaaaaaccttcaatatgaaggcagcag

SEQ ID NO: 1319 - DNA, 386 bp, Homo sapiens
aaattttatttcaaaagcttggatagcttcaatatccaggttgtggcaaaatcaggacacgtgtaaaataccttacaatacattagattcccaaaaggtaccaaaaagtacagtaaaattaacacttccgttacaggaaatgtatgacgcaaataatataaaattaaaaggtgaaaaaaaggtgacactggtttcctaagatacaatttactctttacaaccagggtccacaggtccaggctgcagagcggcagcaggaagcagagcctcccacctgcttctgggggacctggtaataaaaatcagcccatgatggcgctatggcctctcagacaccacacgctgcctaaacacctagagctctggaaatagtcaacaggagagtg

SEQ ID NO: 1320 - DNA, 241 bp, Homo sapiens
  misc_feature (1)...(241): n = A,T,C or G
ctgattttatttccttctcaaaaaaagttatttacagaaggtatatatcaacaatctgacaggcagtgaacttgacatgattagctggcatgattttttcttttttttcccccaaacattgtttttgtggccttgaattttaagacaaatattctacacggcatattgcacaggatggatggcaaaaaaagtttttttgtacaagcttttttttttttttttttttttttnaaaaaaaaac

SEQ ID NO: 1321 - DNA, 358 bp, Homo sapiens
ctggaatgcaaagaaatgtgcacaacccagagctctgtcagccttgccaaaactcaagtgcccccatgggagggtcttgcaacatatgttctgttgagcaaagaggttgcaaaccaagcggttattgcaataaacaccacttgtgacaaacaaagtttgtaagtttaaatttattttttaaaaatgcttgtcttcctcactagacaatcaactctatgagggcagagactatgtcaccactgtcccaccagcccctggcacacagtaggtactcaataaatatatgttggaaggatggatggaggtaatggatggaaagatggatggaaggatgaatggagggatggatgtgacccag

SEQ ID NO: 1322 - DNA, 152 bp, Homo sapiens
aaaaacaaaaacccttaacggaactgccttaaaaaggcagacgtcctagtgcctgtcatgttatattaaacatacatacacacaatctttttgcttattataatacagacttaaatgtacaaagatgttttccacttttttcaatttttaaa

SEQ ID NO: 1323 - DNA, 386 bp, Homo sapiens
  misc_feature (1)...(386): n = A,T,C or G
ggcctcaatnactgtaanagaccctcncagcccanaggcgcccactaggaagtcagcagncctagctcggccacacttggtgctcccagcatcccagggagagacacagcccactgaacaaggtctcaggggtattgctaagccaagaaggaactttcccacactactgaatggaagcaggctgtcttgtaaaagcccagatcactgtgggctggagaggagaaggaaagggtctgcgccagccctgtccgtcttcacccatccccaagcctactagagcaagaaaccagttgtaatataaaatgcactgccctactgttggtatgactaccgttacctactgttgtcattgttattacagctatggacctcgggccgcgaccacg

SEQ ID NO: 1324 - DNA, 647 bp, Homo sapiens
  misc_feature (1)...(647): n = A,T,C or G
aaaccaatcttccaggagattaatcaatgaaatttataagctttatcaacgtataaaatttttttcatcttctgggactcatagaatacaatctgtgtttctgaccagttgaggtagttaaaatagggagggcttttctaatttcgtatttgactatttcagaaagaaaggttatcttttactggtgagcacagtcattgctctgcagatgggctaggattcaaagaatataacacagtgttgttatcataaagagtgttgaagtttatttattatagcaccattgagacattttgaaattggaattggtaaaaaaataaaacaaaaagcatttgaattgtatttggtggaacagcaaaaaaagagaagtatcatttttctttgtcaaattatactgnttccaaacattttggaaataaataactggaattttgtccggtcacttgcactgggttgacaagattagaaccaagaggaacacatatgggagttaaatttttttacctgccccgggccggcccgcttcgaaaggggcgaattcccagcacacctggcnggcccgttacctaagtgggatccccgagcttcgggtacccaaagcctttggccgntaaatcaatggggccattaagccttgntttnccttg

SEQ ID NO: 1325 - DNA, 547 bp, Homo sapiens
ctgctcttcatttattttgaaagcaaattcatttgaaagtgcataaatggtcatcataagtcaaacgtatcaattagaccttcaacctaggaaacaaaatttttttttttctatttaataacacaccacactgaaattatttgccaatgaatcccaaagatttggtacaaatagtacaattcgtatttgctttcctctttcctttcttcagacaaacaccaaataaaatgcaggtgaaagagatgaaccacgactagaggctgacttagaaatttatgctgactcgatctaaaaaaaattatgttggttaatgttaatctatctaaaatagagcattttgggaatgcttttcaaagaaggtcaagtaacagtcatacagctagaaaagtccctgaaaaaaagaattgttaagaagtataataaccttttcaaaacccacaatgcagcttagttttcctttatttatttgggggtcatgaagactatccccatttctccataaaatcctccctccatactgctgcattatggcccaaaagactctaag

SEQ ID NO: 1326 - DNA, 311 bp, Homo sapiens
ctgcctccccagctctatcccaacctctcccaactataaaactaggcgctgcagcccctgggaccaggcacccccagaatgacctggccgcagtgaggcggattgagaaggagctcccaggaggggcttctgggaagactctggtcaagaagcatcgtgtctggcgttgtggggatgagctttttgttttgtttcttccttttttagttcttcaaagatagggagggaagggggaacatgagcctttgttgctatcaatccaagaacttatttgtacattttttttcaataaaacttttccaatgacattt

SEQ ID NO: 1327 - DNA, 382 bp, Homo sapiens
aaattagagaggttaacaagacagatgattactatgcctcatgtgctgtgtgctctttgaaaggaatgacagcagactacaaagcaaataagatatactgagcctcaacagattgcctgctcctcagagtctctcctatttttgtattacccagctttccttttaatacaaatgttatttatagtttacaatgaatgcactgcataaaaactttgtagcttcattattgtgaaacatattcaagatcctacagtaagagtgaaacattcacaaagatttgcgttaatgaagactacacagaaaacctttctaaggatttgtgtggatcagatacatacttggcaaatttttgagttttacattcttacagaaaagtccattt

SEQ ID NO: 1328 - DNA, 228 bp, Homo sapiens
  misc_feature (1)...(228): n = A,T,C or G
aaatgcagaagaagaaacaaaacgaaacaaaaagatcattctgcaaagagacctctcaactcttcatcagccagtggcataactcagaaactgatttaactaatttattatttgagaaaaggggattgaaaaaaattggggggtataatcttctgattcacaattcccagccacattcttttctgtttattctctctcttttttttntttttttttttttttaaaaaa

SEQ ID NO: 1329 - DNA, 261 bp, Homo sapiens
aaacatttcctttgctatgatacaaaggatacttacaaacaaaatattacatatgaccttgttttcgctcttatgttctgacaacttggtaacagcttttaatgcacaatctatacaattaatacaggttatatatgaactataaggtatgctgaaccagaagaatactgacaatatactgtacaataagccttaccagttagtgctgtggaccatttataccaaaaggaaaatgcacatctgtacagtcacctttaccag

SEQ ID NO: 1330 - DNA, 179 bp, Homo sapiens
caggtccaccccggagatgacacgaggctcacatgactctagacacttggtggaaagtgaggcgagaaaaacaatgacttgggccaattacacgactgcaaagctagagctgccaacagggctccagggagcttggcttctgtagaagttctaaggaagcggtacgaactccacggcgg

SEQ ID NO: 1331 - DNA, 322 bp, Homo sapiens
aaaaaaattatgacaagcttcaggtaaaaataatttttaaagggtccatttttcatttacgtacaatcagtacatcttatttacatatatgactggatctttattctattttcttcatataagatattttaactggtaggtaactgccctattctgtttttatagaaagactaaacaccctatttacaggcagttttgatgatgctagtttgtctccaaattacgtactgaatatagttaaaatcttaatgaataacataaaaattaagatccggtattaacagactattttatgggtcacactggatattcaaggagtcag

SEQ ID NO: 1332 - DNA, 741 bp, Homo sapiens
  misc_feature (1)...(741): n = A,T,C or G
ggggctgggcccctgctttttgtactaccatcaacatccacttgcgcatctacagaaggctgggccttgagcatggggaatgtggggagggagcaggacacaccagcactgcaaatggcttccttctcccagggcccaaagggatagaaaagaaggcaacatgaagttaaggccctgtgagcagtctagaaggtccttagcagcagcttctctgaaaacatgtgttctgcctctggagaaagggagcagaaaagtggtgcctgctggcttctcctcctcccctggcagcctgaagacaggtgcaaagtcaactagaagacaggcagcctcggggacgtggtcagcgtgcaagcattgatatcctcagtgtgggctgcccgatgcaaggatggctcggaagcgctccggttgatcttcggtagagagtgttggagcagctcaatggaagacaggatctggggaaaaagaggcctctcttcctttactttcttcacacagtcaagctaccagcctcttcattgctttggggcagttcttatatagcttactaagatctggggaggcatatcctcggcccaccatgaanatgatctgatctcggntgttgatgtgagaataangaagctnccccctcatcagttcataccaatacgatgccataaggagtagacatccgactggaaactgaaatgggttggtatcctgcatttcggatcacctctggggccatncanaaggaca

SEQ ID NO: 1333 - DNA, 235 bp, Homo sapiens
tttaaaacccaaacttccaaaggtttaaactacctcaaaacactttcccatgagtgtgatccacattgttaggtgctgacctggacagagatgaactgaggtccttgttttgttttgttcataatacaaaggtgctaattaatagtatttcagatacttgaagaatgttgatggtgctagaagaatttgagaagaaatactcctgtattgagttgtatcgtgtggtgtatttttt

SEQ ID NO: 1334 - DNA, 277 bp, Homo sapiens
ccacttgctgcctaaaccaatcacagcttcagttttgttttttgtcaagtgttggagttacaagtaggcacctctctgtgcctggtattgctcaggttcagacttggctgggggtgagggggccaggcagaaatcagttaagaaggccattccaggtgtaaatgcctcccggctctacagggggtaatatttactgtcgtcttttcccttcccaggttgattactgacctgtttgttgtgaagatgctgctgcaataagcacaaacagaactcatgg

SEQ ID NO: 1335 - DNA, 326 bp, Homo sapiens
ctgtgctcccgactcctccatctcaggtaccaccgactgcactgggcggggccctctggggggaaaggctccacggggcagggatacatctcgaggccagtcatcctctggaggtagcccaatcaggtcaaagattttgcccaactggtcggcttcagagtttccacagaagagaggctttcgacgaaacatctctgcaaagatacagccaacactccacatgtccacaggtgttgcatatgtggactgcagaagaacttcgggagctcggtaccagagtgtaacaaccacgggtgtaagtgccatctggtagctgtagattctgg

SEQ ID NO: 1336 - DNA, 527 bp, Homo sapiens
ctggagaagttacttttattcttgcagttttatactaggaagtcaacatttaataagccatcatccacaattgattaaaaatgtttaatccttaaattgtgcatcaatatcctatgactccaaattttatttatcactctccttcaagtctgaagaaaatgattaatttgctaagttccacagacagtacagtcccactgacataacatttagtatgatgtcctactctcatattagaattaaggacagccagtatcaaactggcctgaaacctgattgtgttcctggttcagaatacctgtagtaaatctgtaaatccacaccaagacacaacattaaactagggtgtgtatatcttataaaaaccttttcacagtaaaaatcaacattaaaattttaccaaattccaacattatggtttttgaatccaattaagctttcaaaatgcctgattagctgtgaattaattataaataacttcatgtagtttgcccagcatttcaaaatggttatggactatcatgttt

SEQ ID NO: 1337 - DNA, 625 bp, Homo sapiens
  misc_feature (1)...(625): n = A,T,C or G
gtggtagagagctgccaggctttgtgaattacaggacatttgagacaatcgtgaaacagcaaatcaaggcactggaagagccggctgtggatatgctacacaccgtgacggatatggtccggcttgctttcacagatgtttcgataaaaaattttgaagagttttttaacctccacagaaccgccaagtccaaaattgaagacattagagcagaacaagagagagaaggtgagaagctgatccgcctccacttccagatggaacagattgtctactgccaggaccaggtatacaggggtgcattgcagaaggtcagagagaaggagctggaagaagaaaagaagaagaaatcctgggattttggggctttccaatccagctcggnaacagactcttccatggaggagatctttcagcacctgatggcctatcaccaggaggccagcaagcgcatctccagccacatccctttgatcatccagttcttcatgctccagacgtcggccagccagcttcagaaggccatgctgcagctcctgcaggacaaggacacctacagacctgccccgggcggccgctcgangggcgaattccacacactggcggccgntactagttggatcca

SEQ ID NO: 1338 - DNA, 285 bp, Homo sapiens
ccacaattcaaattaaggcaacaaacatataccttccatgaagcacacacagacttttgaaagcaaggacaatgactgcttgaattgaggccttgaggaatgaagctttgaaggaaaagaatactttgtttccagcccccttcccacactcttcatgtgttaaccactgccttcctggaccttggagccacggtgactgtattacatgttgttatagaaaactgattttagagttctgatcgttcaagagaatgattaaatatacatttcctacacgaaaaaaaa

SEQ ID NO: 1339 - DNA, 335 bp, Homo sapiens
ccaggctggtctcaaaactcctgacctcaggtgatccacccaccctggcctcccaaagtgctgggattacaggcgtgagccagtgcacccgaactgcatttgatttatcctgtgttctttattctttataccattcacaattccccttgtatagccatgatgccatttatgcacttcagcctggggataagccagggttacttaaggaaccaacttcacaaaatctaagccataaagtaagcattcctaataaaacaaattgcaatgtaccattaccttatcactaccaggatcacttagtctctggtgctcaacacataagtggcaaactttgg

SEQ ID NO: 1340 - DNA, 231 bp, Homo sapiens
aaataagtttatgtatacatctgaatgaaaagcaaagctaaatatgtttacagaccaaagtgtgatttcacactgtttttaaatctagcattattcattttgcttcaatcaaaagtggtttcaatattttttttagttggttagaatactttcttcatagtcacattctctcaacctataatttggaatattgttgtggtcttttgttttttctcttagtatagcattttt

SEQ ID NO: 1341 - DNA, 231 bp, Homo sapiens; identical to SEQ ID NO: 1340

SEQ ID NO: 1342 - DNA, 202 bp, Homo sapiens
cagatgcattaggtcttgttgagtatcttaatgagtggcttcagatactcaaaccacttagcgatgaccccacagtatctgcctcacggtggaaaataccaagttcttggagattactctttggcagtggtcttccccctgcacttttctgatctaatttctgttttataccttatacccaaaacacttactaccaacacag

SEQ ID NO: 1343 - DNA, 450 bp, Homo sapiens
  misc_feature (1)...(450): n = A,T,C or G
ccgccacatntttattgcatactcaggtgaataacttattatacaatgaacactcctccattaggagaccatgcccacttacagaatgcagccgtaaatgcggtaaatctatttacagaggttggggtgcaagatgagagaagtatcagccccaggaatttgaagtgagaatgatctacaaattctcctgacaaggagcaaccgggcttgtgctagtgaggtctgaaagaattcctggcagagcgtagggggagattagatctcggaattgacagcaagtttggggacagtgcaagaagaggggggtgacctgtgaattggtgctggggagctgctgaggcccaatgtgaggcagcactagagagatgagtaaatttagggtgatctttagcctctcctacccaggcaagaagggttggggagcgggggtgccagcaagttggcttccag

SEQ ID NO: 1344 - DNA, 177 bp, Homo sapiens
ggggcgtccccatggcgactgtggcccggcccctcctctcttgcctgactctcctctcttgcctgactctagacactaacttagttccaggttcggtgccctgttggtgctcctgtttccaatagcttaggtcccatggtgggggaggaacctcaggggctatgcagcccccgccag

SEQ ID NO: 1345 - DNA, 398 bp, Homo sapiens
cctcattccattggctgggctccacctaccagttggtggacatccatgtgacagaaatggagtcatcagtttatcaaccaacaagcagctccagcacccagcacttctacctgaatttcaccatcaccaacctaccatattcccaggacaaagcccagccaggcaccaccaattaccagaggaacaaaaggaatattgaggatgcgctcaaccaactcttccgaaacagcagcatcaagggttatttttctgactgtcaagtttcaacattcaggtctgtccccaacaggcaccacaccggggtggactccctgtgtaacttctcgccactggctcggagagtagacagagttgccatctatgaggaatttctgcggatgacccggaatggtacccag

SEQ ID NO: 1346 - DNA, 483 bp, Homo sapiens
ctggacctccaggtgtaagcggtggtggttatgactttggttacgatggagacttctacagggccgaccagcctcgctcagcaccttctctcagacccaaggactatgaagttgatgctactctgaagtctctcaacaaccagattgagacccttcttactcctgaaggctctagaaagaacccagctcgcacatgccgtgacttgagactcagccacccagagtggagcagtggttactactggattgaccctaaccaaggatgcactatggatgctatcaaagtatactgtgatttctctactggcgaaacctgtatccgggcccaacctgaaaacatcccagccaagaactggtataggagctccaaggacaagaaacacgtctggctaggagaaactatcaatgctggcagccagtttgaatataatgtagaaggagtgacttccaaggaaatggctacccaacttgccttcatgcgcc

SEQ ID NO: 1347 - DNA, 375 bp, Homo sapiens
ctgaggcaggaagctttggagatgagccgtaaccgtattgccgaaaacctgggggatgtccagataagtgacaagatcaccatctcaaagaacttcaaggagaatgtgattcgccctatcctgaaagctcacttccggagggatgagtttctgggacggatcaatgagatcgtctacttcctccccttctgccactcggagctcatccaactcgtcaacaaggaactaaacttctgggccaagagagccaagcaaaggcacaacatcacgctgctctgggaccgcgaggtggcagatgtgctggtcgacggctacaatgtgcactatggcgcccgctccatcaaacatgaggtagaacgccgtgtggtgaaccag

SEQ ID NO: 1348 - DNA, 316 bp, Homo sapiens
ccaactagcaccgagaagtcatattgaactcatttgcagttgtcttggcaattaagcgtattttttcattccagtccaagcacaaatgtggatcactgaacacagtactggaagcgccatttgcaggtacagattgcagtcatcattaaatgagccagaaggcagatactgtttttattttgtgtggggggagggggaagcggcacagtactagcaggagatgaaataaaatgattaggaaacaatgaggttataagatcactgttcttatttgggttaagcaggtcatgttgagaagatggttatttctttcaga

SEQ ID NO: 1349 - DNA, 316 bp, Homo sapiens
ccagagctgcggggcctcagtacacggagctgttccggatgccacagcacagcaccatgctcaggatcatctcgaagatcatgatcacagcgaccacgatggcagcaatgccgatgaggtacagcttcccggagaagaggtcatcgatcttctggtggcagtcctccttgaagaggttgctgatgatgttgctgcccgagggacacaaattgttcttgagcactgaggtggtcaaagcagtcagtgtgctggagccacagcagtcaagcgtctcgtggaaggtcttcaccacagccttggcgttgttggcgtcatc

SEQ ID NO: 1350 - DNA, 225 bp, Homo sapiens
ctgagtggagggtggggacaggtgcaaactggagaggcctagagagctagagaagcaagtaagggccagggccagagtcggcttcaatggaacaacagcccagtgccctaaggcccctaactcttgctggctgtttcttgaccccaagccagggttgggagtcctctgggcatccattttttctaaaggaactggacagagtacacacaggaaaggaagctgtca

SEQ ID NO: 1351 - DNA, 591 bp, Homo sapiens
  misc_feature (1)...(591): n = A,T,C or G
aaaaagtgtgactgtcagttgtatctgttgcttttctcaatgattcagggatacaaatgggcttctctcattcattaaaagaaaacgcgacatctttctaagattctctgtgggaaaatgactgtcaataaaatgcgggtttctgggccattcgtcttactttcattttttgattacaaatttctcttgacgcacacaattatgtctgctaatcctcttcttcctagagagagaaactgtgctccttcagtgttgctgccataaaggggtttggggaatcgattgtaaaagtcccaggttctaaattaactaaatgtgtacagaaatgaacgtgtaagtaatgtttctacaggtctttgcaacaaactgtcactttcgtctccagcagagggagctgtaggaatagtgcttccanatgtggtcctcccgtgtggggcccancaatgggggcccctgatgccaanagctctggaggttcttgaaagaggggacacgaaggaaggagtgactggganncctccccatnccaaggaggnggggagggtggcctggaaananctgcctcntnccacttttggccntnactggatt

SEQ ID NO: 1352 - DNA, 602 bp, Homo sapiens
  misc_feature (1)...(602): n = A,T,C or G
aaaaagtgtgactgtcagttgtatctgttgcttttctcaatgattcagggatacaaatgggcttctctcattcattaaaagaaaacgcgacatctttctaagattctctgtgggaaaatgactgtcaataaaatgcgggtttctgggccattcgtcttactttcattttttgattacaaatttctcttgacgcacacaattatgtctgctaatcctcttcttcctagagagagaaactgtgctccttcagtgttgctgccataaaggggtttggggaatcgattgtaaaagtcccaggttctaaattaactaaatgtgtacagaaatgaacgtgtaagtaatgtttctacaggtctttgcaacaaactgtcactttcgtctccagcagagggagctgtaggaatagtgcttccagatgtggtctcccgtgtggggcccagcaatgggggcccctgatgccaagagctctggaggttcttgaaagaggggacacgaaggaggagtgactgggaagcctccntgccaaggaggtgggaggtgccctgnaaatanctgcctcatccacttanggccatgactgganttnaaatgncagnggtgtg

SEQ ID NO: 1353 - DNA, 449 bp, Homo sapiens
cttcttttagtaactagtataacaagcactggtatttttgtacaaaaaagaaaaacaaaagattgactattgtggtctgcatgacataaacaaacaaatggtgatatcaaagcaacgtataccccagtccagtgtgtgttgccataatttgcaattcagcttaacagtgcacccaatctatatttgcattttgatattatttaagctctatgtacaaggttttgcatgtatttatatggttcttagggaaaaaaaatgctataaactgcaaatctgaaattcaaatgtgttgttccactgagaccagaagaagaagaggagttttaaaagggataatttgttggaaccaataaagctttttgctgatgaacagaaaccaatactgctgtgcactgagaataaaaactcatgcccacttgtaaaaaaaaccccaaaaaaaaaaaaaaaaa

SEQ ID NO: 1354 - DNA, 289 bp, Homo sapiens
caaccaattatcagcaaactctatggaagtgcaggccctcccccaactggtgaagaggatacagcagaaaaagatgagttgtagacactgatctgctagtgctgtaatattgtaaatactggactcaggaacttttgttaggaaaaaattgaaagaacttaagtctcgaatgtaattggaatcttcacctcagagtggagttgaaactgctatagcctaagcggctgtttactgcttttcattagcagttgctcacatgtctttgggtgggggggagaagaagaattgg

SEQ ID NO: 1355 - DNA, 173 bp, Homo sapiens
ctgagaacttcccctctcaggtgcaaagggatggcagagaagtctttccaagagggctcaatccactaagagattatggcttagagaagggaacagctcaaagaagcccttgaagagggtgagggtctggaggactcctgtggtgcaggccatctcccggatagagtgcatgg

SEQ ID NO: 1356 - DNA, 449 bp, Homo sapiens
ccgggcaggtccaagttaatgaggtcacggccagagcggtgggagaactcgactgcatagactagaccatccggaccaacgatgtcagagacatgggagaccgtggtgcccgaggcagccccgaggtagagaaccttagcccccggtttgatgtggatctggtccacaccacccaggattgctgctgctagcttggagcggaaggggttccaggctcggtactcaattttgtcatctccttccgaaatcgagactctcttctctccataaactgattccccagggaccaggttcttggtgaccagtgcatcttcctttcctcgacaaatgaagacaccctcatgccgatgcggctccaccatcacattcttccccgactggtttcctctttttcctccccgaccacgaccccggttgccaccagaatggacctcggcccgcgaccacgc

SEQ ID NO: 1357 - DNA, 302 bp, Homo sapiens
aaatgcttcttttatttcattggttgtacattgggtgagtgaactgaatattacaaccaaaacatagtattgatacaaattagactcctgtttacactgtaaggtaatgaatgagggaattctttaagtgttacagaaagatttagtagaaatgttaccagtggtatggctgaaagaatatttcggtgaagtgctgttatatcctgaaaaccaagagtgaaatgtagttcccatacaagtggagagttagtctcttaactacagtatttgttgaactgatatcttcatgtcttggatattgg

SEQ ID NO: 1358 - DNA, 169 bp, Homo sapiens; identical to SEQ ID NO: 1246

SEQ ID NO: 1359 - DNA, 708 bp, Homo sapiens
  misc_feature (1)...(708): n = A,T,C or G
acatatccttggaacagaagatcttattgtggaagtgacttccaatgatgctgtgagattttatccctggaccattgataataaatactattcagcagacatcaatctatgtgtggtgccaaacaaatttcttgttactgcagagattgcagaatctgtccaagcatttgtggtttactttgacagcacacaaaaatcgggccttgatagtgtctcctcatggcttccactggcaaaagcatggttacctgaggtgatgatcttggtctgcgatagagtgtctgaagatggtataaaccgacaaaaagctcaagaatggtgcatcaaacatggctttgaattggtagaacttagtccagaggagttgcctgaggaggatgatgacttcccagaatctacaggagtaaagcgaattgtccaagccctgaatgccaatgtgtggtccaatgtngtgatgaagantgataggaaccaaggctttagcccttctcaactcattgactggaacaaaacccatagcattgggncagcagatccttgtcaccagagcaaccccntttgccngcancagatagtcctgaatccctctctgatcatcnggggnggtgcntctacacaacagatgcccacggtggatagcattggggaaccccatgttacnatctgggatnttcaagnaaatnagcccgtcttcccacctgggaagga

SEQ ID NO: 1360 - DNA, 370 bp, Homo sapiens
aaagtttgctaaatcttagcacaaatgcagattcccagagctcttctgattttgaagttccctcaactccagaagctgagttacctaaacgagagcatttacaatatttatatgagaagctggcaactggtgagagtatagcagtcaaaaaaagaaaatgctcactcttagatacctaagaattcaaagcgtttcaacctagagcaaccactaaaaaacctgcacagagatgacagtcaatattacaatagagaaaatacagtacttaaaaatgttcaaataacctggttgggtgtggtggctcacacttgtaatcccagcactttgaggtgggcaatggcttgagcccaggagttcgacaccagcctgg

SEQ ID NO: 1361 - DNA, 172 bp, Homo sapiens
ccagcctgttgcaggctgcttcgtagcgggcgtcggctgcggacttcccttcccgggtctggatcttttcatcctcgagacaggacaagatgaagttcacggcttcttctggggtaaagaccttgaagagcccatcacaggccaacaaaatgaacctgtcattgggggtcag

SEQ ID NO: 1362 - DNA, 172 bp, Homo sapiens; identical to SEQ ID NO: 1361

SEQ ID NO: 1363 - DNA, 162 bp, Homo sapiens; identical to SEQ ID NO: 970

SEQ ID NO: 1364 - DNA, 88 bp, Homo sapiens
ccaaagaagaatcatcctttctactccttctctttcgtctggtcactcagaaatataatattatcagctatgattgttgttgcttgtc

SEQ ID NO: 1365 - DNA, 292 bp, Homo sapiens
  misc_feature (1)...(292): n = A,T,C or G
ctgatccagaaggagctcaccattggctcgaagctgcaggatgctgaaattgcaaggctgatggaagacttggaccggaacaaggaccaggaggtgaacttccaggagtatgtcaccttcctgggggccttggctttgatctacaatgaagccctcaagggctgaaaataaatagggaagatggagacaccctctgggggtcctctctgagtcaaatccagtggtgggtaattgtacaataaatttttttggtcaaatgtnaaaaaaaaaaaaaaaaaaaaaaaaaaaaaaa

SEQ ID NO: 1366 - DNA, 711 bp, Homo sapiens
  misc_feature (1)...(711): n = A,T,C or G
aaatgtttatggtttttatttttcaatatttattttggttttcttacaaaggttgacattttccataacaggtgtaagagtgttgaaaaaaaaattcaaatttttgggggagcgggggaaggagttaatgaaactgtattgcacaatgctctgatcaatccttctttttctcttttgcccacaatttaagcaagtagatgtgcagaagaaatggaaggattcagctttcagttaaaaaagaagaagaagaaatggcaaagagaaagttttttcaaatttctttcttttttaatttagattgagttcatttatttgaaacagactgggccaatgtccacaaagaattcctggtcagcaccaccgatgtccaaaggtgcaatatcaaggaagggcaggcgtgatggcttatttgttttgtattcaatgattgtctttccccattcatttgtctttttagagcagccatctacaagaacagtgtaagtgaacctgctgttgccctcagcaacaagttcaacatcattagagccctgtagaatgacagcctttttcaggttgcccagtctcctcatccatgtatgcaatgcttgttctttncantggtaggtgaatgttctgangaggcntaatttggaactngcccggggcggcccgctccaaaagggcggaatttccagccccccctgggcgggccgttnctaatnggatccc

SEQ ID NO: 1367 - DNA, 682 bp, Homo sapiens
  misc_feature (1)...(682): n = A,T,C or G
ccaggttttagatattaacctggctgcagagccaaaagtgaaccgaggaaaagcaggtgtgaaacgatctgcagcggagatgtacggctcctcttttgacttggactatgactttcaacgggactattatgataggatgtacagttacccagcacgtgtacctcctcctcctcctattgctcgggctgtagtgccctcgaaacgtcagcgtgtatcaggaaacacttcacgaaggggcaaaagtggcttcaattctaagagtggacagcggggatcttccaagtctggaaagttgaaaggagatgaccttcaggccattaagaaggagctgacccagataaaacaaaaagtggattctctcctggaaaacctggaaaaaattgaaaaggaacagagcaaacaagcagtagagatgaagaatgataagtcagaagaggagcagagcagcagctccgtgaagaaagatgagactaatgtgaagatggagtctgaggggggtgcagatgactctgctgaggagggggacctactggatgatgatgataatgaagatcggggggatgaccagacctgcccgggcggncgctccaaaggggcgaattccagcccacttggncggccgttncttggnggaatcccnagcctcggnacccaaccttggggagtaatcatnggccttagc

SEQ ID NO: 1368 - DNA, 468 bp, Homo sapiens
ctgacccacggcatcactgagctgggcccctacaccctggacaggcacagtctctatgtcaatggtttcacccatcagagctctatgacgaccaccagaactcctgatacctccacaatgcgcctgacaacctcgagaactccagcctccctgtctggacctacgaccgccagccctctcctggtgctattcacaattaacttcaccatcactaacctgcggtatgaggagaacatgcatcaccctggctctagaaagtttaacaccacggagagagtccttcagggtctgcttatgcccttgttcaagaacaccagtgtcagctctctgtactctggttgcagactgaccttgctcaggcctgagaaggatggggcagccaccagagtggatgctgtctgcacccatcgtcctgaccccaaaagccctggactggacagagagcggctgtactggaagctgagccag

SEQ ID NO: 1369 - DNA, 390 bp, Homo sapiens
aaatagaattactttattaatctttgaaatcagtaattccaaagggtgcctttaccctggctcatgttgtcaatggcacaccgatttgtctcctctctctaggaaacttgtgatgaatgctcctctttccccctagatcctccgaaaagggaggaacaactttggcggatgatgatgttgaaattttaagcttgtacaaagaaaataaagcttcatactgtaatctggaaaagaagaggaagcaaaatgcaaatagccaaagagcctcttttatatcatctctgtgcagcagcagtaaagggacagagaagacctaagcagtttgggggcatggggcaaagggaaggtaaaagatacaagtgtgctctgacggggtatataatgcatcag

SEQ ID NO: 1370 - DNA, 277 bp, Homo sapiens
cctggactgactgatactacagtgcctcgccgcctgggccccaaaagagctagcagaatccgcaaacttttcaatctctctaaagaagatgatgtccgccagtatgttgtaagaaggcccttaaataaagaaggtaagaaacctaggaccaaagcacccaagattcagcgtcttgttactccacgtgtcctgcagcacaaacggcggcgtattgctctgaagaagcagcgtaccaagaaaaataaagaagaggctgcagaatatgctaaacttttgg

SEQ ID NO: 1371 - DNA, 357 bp, Homo sapiens
  misc_feature (1)...(357): n = A,T,C or G
aaaatgatttttaacattatgagagactgctcanattctaagttgttggccttgtgtgtgtgtttttttttaagttctcatcattattacatagactgtgatgtatctttactggaaatgagcccaagcacacatgcatggcatttgttccacaggagggcatccctggggatgtggctggagcatgagccagctctgtcccaggatggtcccagcgggtgctgccaggggcagtgaagtgtttaggtgaaggacaagtaggtaagaggacgccttcaggcaccacagataagcctgaaacagcctctccaagggttttcaccttancaacaatgggagctgtgggagtgattttgg

SEQ ID NO: 1372 - DNA, 176 bp, Homo sapiens
cctatgaccttggccgcagggctattgcttatgccactcacagagacagctattctggaggcgttgtcaatatgtaccacatgaaggaagatggttgggtgaaagtagaaagtacagatgtcagtgacctgctgcaccagtaccgggaagccaatcaataatggtggtggtggcag

SEQ ID NO: 1373 - DNA, 164 bp, Homo sapiens
aaagtttagcatattctgcagcctcttctttatttttcttggtacgctgcttcttcagagcaatacgccgccgtttgtgctgcaggacacgtggagtaacaagacgctgaatcttgggtgctttggtcctaggtttcttaccttctttatttaagggctttctt

SEQ ID NO: 1374 - DNA, 717 bp, Homo sapiens
  misc_feature (1)...(717): n = A,T,C or G
ggcagcagaaccactgacagagctagaggagcccattgagaccgtggtcaccaccttcttcacctttgcaaggcaggagggccggaaggatagcctcagcgtcaacgagttcaaagagctggttacccagcagttgccccatctgctcaaggatgtgggctctcttgatgagaagatgaagagcttggatgtgaatcaggactcggagctcaagttcaatgagtactggagattgattggggagctggccagggcagtgtccacctgaacttcctcctcatcggactgaacaacgggggactccccaccctcactgatgtcccgggtggccgagtcggtgcaggtggaggaagaagaaggtggcttggctcttaattctgagggatttggaacctggagggtaatctcattctgacaggtactggattcaggccctaaggcgggggacagcacagtgttctcttctcctccagagttcaggaagacgtccagggcctcctggtccgatatgtccatcaggtccatctgctccagcatgtccacgttcacttccatggatgacatgctgcctatgggctctcgccgntctgcaatctgcacctgcccgggcggccgctcgaaaggcgaaattccagcacactggcggccgtttacttagtgggatcccancttcggtacccaanctttggccntnatcnatgggncnttagcttgntt

SEQ ID NO: 1375 - DNA, 250 bp, Homo sapiens
  misc_feature (1)...(250): n = A,T,C or G
tggagaatcagctcagcaggccttggccctcccccgtggacaccaggcagctccactggcctccgggtcagccctcagggccaccgtgatggggtggaggagggttaaataaccatctttacagaaataacagtctcctacagaaagtgcctgagctcagcccatggtccgataacctcatggaaaacaaacaacaaataaaaaaaaaaagtgctgctgacacctntcaaaatctggtggacatnaagct

SEQ ID NO: 1376 - DNA, 594 bp, Homo sapiens
agctcttgacctataaagtataaaaagtaattacaatgaaatattcttcagtaaatctgacactttgggattccaggcaaaaggatcgcttgggtgccaagagttcaagaccagcctggtcaacatagtgagattctatctcaatggatcactgtgtggccgttcagcatcttcctatgctgtgtcaggcaagagaaattctggaaagagagcatctcatgtttattaaggagactgggtgtccttgtagaaagtcctgccatgcacaaccccggtcttaactgatgtgtttcaccatactgaaggcaagttgccatctaacatagttgaaggcgagccagttgtggtgatctttgttcctgcctagtccaatgtgaataacaaaatgaagaatatcaggatgattcgagaccaggaatactacagatgtccaacacttccacctggaatccccaaagaggctcgcttttagcctccacactggttggtgacctgcctctgcagttcactctgctgcttcagatgaaaattttcaggtctgtctgccactgtagtgaagcactgctttgggtagtgtctgtggagaaacttttt

SEQ ID NO: 1377 - DNA, 104 bp, Homo sapiens
ctgtaactgtctatgtacagaaaccggtctgggtgctttggcttacaggttaccttgtgccatacctttgaaacaagggacctgtccaggcttccttctggtgg

SEQ ID NO: 1378 - DNA, 378 bp, Homo sapiens
aaatccaggcttaacattttcgaggctgctgaataatgtagatccttttcagtggaacaaccttttccagagcaggtgtgggtttttgatgcgccatgtgcactgttgctggaaatttatagttgagcttctccagtgcgtcattcagggcatccggtgtctgtattttggcaacatttgcaatggcacttgttttctcgaatcctgtttttttggtatgtctttccaaggtgccaatttcttgttttttggaaattctcattcctccagcttttactgcaggaggatgtccccctttccgaggggagagcaggtcttgcacttcatttgccatagcgtgtgccagtgccagtgccagtgctggtgctctggaggctg

SEQ ID NO: 1379 - DNA, 508 bp, Homo sapiens
ctgcgcctcctgactcgaggacaggccgttggcaccctgaaccaggatgtttccagggtgaaggtctgcatggacaaagttatccacaaatatcatcttcaggagcatgttgatccccagccgtgcaatcttccttttcaagtccacgggaattcctgcctgctggtaactggacacaggcacactctcttcatacgtttccaccaagacttctctggtgacaaaggggcgcagaggggtggggaacttgacggctttcacattccggaagttgacctggaagtgttctagattctgagcttcgtaacgcaggtcaatctgttggaccatcagcttctcaaattcctccacaatctcaggcaagctaagccacttgatgcctggcaaaactcccaggactcggctgccaatcttcgtcagcagcaggtccatatgcacctgagcgagcaggccagggtgcaacactttcactgccacggagatgaggttggtggcctcaggttggtgg

SEQ ID NO: 1380 - DNA, 449 bp, Homo sapiens
  misc_feature (1)...(449): n = A,T,C or G
aaaatgaataaaaaattggtttactaaactactggtctccagcaccattttctgttttctgttgtttggatgcaggttcttctttgtctgtttcttctcttgctcttttcacaggtccagttgcaccattttcatcatgttcatcatgttcatcatcactagcaaatttcgttttcttgccctgaaactgtacttttcctttaccagacccaggctgggnagntttattaccctttccttttcctttaaatntacgaccttttgacttccatttgtttagggattcttgttggtcttctattattttcttcagtgcttnttttcccacctctccttctagtacttcccaagtcacacctgcccgggcggnccgctcgaaagggcgaattccancacactggcgggcgtnactantgggatccganctnnggaccaagctttggcntaat

SEQ ID NO: 1381 - DNA, 355 bp, Homo sapiens
aaaatgaataaaaaattggtttactaaactactggtctccagcaccattttctgttttctgttgtttggatgcaggttcttctttgtctgtttcttctcttgctcttttcacaggtccagttgcaccattttcatcatgttcatcatgttcatcatcactagcaaatttcgttttcttgccctgaaactgtacttttcctttaccagacccaggctgggcagctttattaccctttccttttcctttaaatctacgaccttttgacttccatttgtttagggattcttgttggtcttctattattttcttcagtgcttcttttcccacctctccttctagtacttcccaagtcac

SEQ ID NO: 1382 - DNA, 358 bp, Homo sapiens
gcctgttgcaggcaaatgtaaagtctagaaaataatgcaaatgtcatggctactctatatacttttgcttggttcattttttttcccttttagttaagcatgactttagatgggaagcctgtgtatcgtggagaaacaagagaccaactttttcattccctgcccccaatttcccagactagattttaagctaattttctttttctgaagcctctaacaaatgatctagttcagaaggaagcaaaatcccttaatctatgtgcaccgttgggaccaatgccttaattaaagaatttaaaaaagttgtaatagagaatatttttggcattcctctaatgttgtgttttttttttttttg

SEQ ID NO: 1383 - DNA, 460 bp, Homo sapiens
ctggacagtagattacaaagcatctccgatcacgttaaggcagatgatcaatctgtggctgcatctgtaactcctcctgggaaaataatcctgttggagttgggggctcttcccagttgtctggttagttggcccaggaaggggcagtcctgaagctggcgggtggggagccaggccccacctgtcttgtcactgctcgttctgctggccctctgtcactgatgctgatacggagccctggcccttgttgacatcactgatgcacacccactgcccatcaactgactccttccacagggtcaccttattgtctccaccagagacagccaggatgttggctgtgatggaccagctcacatgccacaccacatcgttgaacttgtgcaacaatttaggggaccacgtattgcttgaggcatcatcacaggtccaaatgaacacacgaccatcctgggagcag

SEQ ID NO: 1384 - DNA, 259 bp, Homo sapiens
aaactcacatccatattacacctttcccccctgaaatgtatagaatccatttgtcatcaggaatcaaaacccacagtccattgtgaagtgtgctatatttagaacagtcttaaaatgtacagtgtattttatagaattgaagttaacattcttattttcaagagaatttatggacgttgtagaaatgtacaaatgcatttccaaactgccttaaacgttgtatttttatagacatgttttttaaaaatcctaagttttt

SEQ ID NO: 1385 - DNA, 370 bp, Homo sapiens
  misc_feature (1)...(370): n = A,T,C or G
ccaggctggtgtcgaactcctgggctcaagccattgcccacctcaaagtgctgggattacaagtgtgagccaccacacccaaccaggttatttgaacatttttaagtactgtattttctctattgtaatattgactgccatctctgtgcaggttttttagtggttgctctaggttgaaacgctttgaattcttaggtatctaagagtgagcattttctttttttgactgctatactctcaccagttgccagcttctcatataaatattgtaaatgctctcgtttaggtaactcagcttctggagttgagggaacttcaaaatcagaagagctctgggaatctgcatttgtgctaagatttancaaacttt

SEQ ID NO: 1386 - DNA, 292 bp, Homo sapiens
ccaacagagtgaagccctgtctctactgaaaatacaaaaattagccaggtgtggtggtgcatgcctgtaataccagctacttgggaggctaaggcatgagaattgcttgaacccaggaggtggaggctgcagtgagccgagatcacgacactgcactccaggtcctagaatgccacaaaagccccttggaaccttgtcctatgggcggtggctaactcctgaaggtttctgagcaagggggtaacaggacaggcgggcatgtcataaacgtcacctgggacgtgagtggtgg

SEQ ID NO: 1387 - DNA, 181 bp, Homo sapiens
  misc_feature (1)...(181): n = A,T,C or G
gttttattttggaccaaaaaaaaaagcaattgaattgttttgtanctggaggcatgggcaaggggggtccccaggtagtaaactccccaggtgggctgagggctagggctgancctcaggtgggtctcctgttcccagtgctaccctgcatagcggcctccttcccaggccctggggcagc

SEQ ID NO: 1388 - DNA, 560 bp, Homo sapiens
  misc_feature (1)...(560): n = A,T,C or G
aaagataaggaaagaggctcatagagtttatatcatttgccccaggtcacatagttgaagcggcagagagattagaatgcaactccactctaaagtcctcctgctttcctccaacatcaggcgttccccattgtaccacacccttacatggaaaacaactcttggcggatttatggctctcaggaggagttgatctagcccatccaatgtatgccttttttggagcttgggagtagagaaatctggaccacatttccaagagggcaagtctgatttgtctatttcttctttgtttcagaagaaagacctcaacaggtggcgaaagaagcatagaaggattgaatgctgcctacccgactggtgggctattaatagttcccctaagcatgttctttaatagaaaacggagaaaaatgttgataaacaaaaatgtgcaaacccaatgtgcatgttaatcaatgattccaatttaatcccctaaattctnanacttggncggacccctanggcaattcaccctggngcgtctatgatcactcgncacttgngaaatggctact

SEQ ID NO: 1389 - DNA, 495 bp, Homo sapiens
  misc_feature (1)...(495): n = A,T,C or G
ctggctttgcagtcatgcataaaggtgaggacacttaattcaaggcatctgggggctggtgtcaccgcacatgaagagtagtgcccatgctgtcccacgagcttccttgggaaaagggaaaaacaaatcttttcctcaaatagaattgtcgcaggaaagagccatgacatttcattcactgtttaatcatcgggtggcaggatttctttgaagtagaatctggtagtacccctcccaatctttgctggatcacttctaaatggtgaatatactctgtcaaggaatgttctggatcttgagaagcagtcagggatctttctaatcttgaatttggggatggagtggctcttcccccactgtgtggggaggctgctgctgccagtctgcggcctctggcanggtccctggtgtggacctcccggcggccctcaaaggcgaattcaccactgcggncgtctatggatccactcgnccacttgcgnatatgctactgtt

SEQ ID NO: 1390 - DNA, 385 bp, Homo sapiens
aaaggacaagaatccttcaagaaacaggaaaaaactcctaaaacaccaaaaggacctagttctgtagaagacattaaagcaaaaatgcaagcaagtatagaaaaagcgcattgaacagtcctgggcactacatgtaaattaagcccaaagatggggagaaaggaaaaggagagacaaatatagtccatactgagtgtcatcaacaatccagactgaagtcttctattttaatctcaatccccttttctgatttgccacccatgcctcttcaggctggaaacaatctcttggttccctaaagcactttcttctgactgctgtgattcagtgaaccttgccctttgctttctattacttgtgcatttgcctcacctgacaatgtttt

SEQ ID NO: 1391 - DNA, 313 bp, Homo sapiens
aaacttccctctgtggaagatattcaaaagccacaagtggtgcaaatgtttatggtttttatttttcaatttttattttggttttcttacaaaggttgacattttccataacaggtgtaagagtgttgaaaaaaaaattcaaatttttgggggagcgggggaaggagttaatgaaactgtattgcacaatgctctgatcaatccttctttttctcttttgcccacaatttaggcaagtagatgtgcagaagaaatggaaggattcagctttcagttaaaaaagaagaagaagaaatggcaaagagaaagtttt

SEQ ID NO: 1392 - DNA, 155 bp, Homo sapiens
ccaattgaaacaaacagttctgagaccgttcttccaccactgattaagagtggggtggcaggtattagggataatattcatttagccttctgagctttctgggcagacttggtgaccttgccagctccagcagccttcttgtccactgctttgat

SEQ ID NO: 1393 - DNA, 568 bp, Homo sapiens
  misc_feature (1)...(568): n = A,T,C or G
aaacatgatagtccataaccattttgaaatgctgggcaaactacatgaagttatttataattaattcacagctaatcaggcattttgaaagcttaattggattcaaaaaccataatgttggaatttggtaaaattttaatgttgatttttactgtgaaaaggtttttataagatatacacaccctagtttaatgttgtgtcttggtgtggatttacagatttactacaggtattctgaaccaggaacacaatcaggtttcaggccagtttgatactggctgtccttaattctaatatgagagtaggacatcatactaaatgttatgtcagtgggactgtactgtctgtggaacttagcaaattaatcattttcttcagacttgaaggagagtgataaataaaatttggagtcataggatattgatgcacaatttaaggattaaacatttttaatcaattgtggatgatggcttattaaatgtnacttnctantttaaactgcanaataaaagtaacttntccanactcggccgnnacacnctaaggggaatccnccnctggcggccgt

SEQ ID NO: 1394 - DNA, 427 bp, Homo sapiens
  misc_feature (1)...(427): n = A,T,C or G
cttctgagtacatcatttcatgtcatcctgttggcactgatgaagaacccttacagttcagggttcctggaacttctaccagtgccactctgacaggcctcaccagaggtgccacctacaacatcatagtggaggcactgaaagaccagcagaggcataaggttcgggaagaggttgttaccgtgggcaactctgtcaacgaaggcttgaaccaacctacggatgactcgtgctttgacccctacacagtttcccattatgccgttggagatgagtgggaacgaatgtctgaatcaggctttaaactgttgtgccagtgcttaggctttggaagtggtcatttcagatgtgattcatctagatggtgccatgacaatggtgtgaactacaagattggagagaantgggaccgtcagggagaaaatgg

SEQ ID NO: 1395 - DNA, 644 bp, Homo sapiens
  misc_feature (1)...(644): n = A,T,C or G
aaagaatcttttagacatctggaagcctttctattcattcctcagtacagtgttccagccatcctgcttgttttttccctccaatacctcccagaacagaaacacttgcatcgagtctgttcctaagaactagttttgaaaaagaagcgatgtacaaaaatatttaacagaactatgaaagatgcaggaaaggagtctttcttcgtagcaaagtagtcgttgctttgcatggtttcttttgtatactcttcagggtttgtttatctgccccatgaataacacagcacctgtaggattatgtcggatgaaaaacagaaaaggtctgtctactataaaccagggaggcgatgatcttgcaatgagaattgcagttgttgctgctgaagctttggttccatcttcactgacttcaatttttgctttttgcaagatatgagaaacatggaggttttctgaccttgttattttgcaaaatttgcctttgatgaatcaaacatgtcaagtaatgccaaaactttcagcgggttccttcaaatctgtttgtgnttcaanacctgcccgggcggccgttcanggggaattccancnccctngcgggcgntctagtggatccanctnggnccaancttgngnaanatggctac

SEQ ID NO: 1396 - DNA, 206 bp, Homo sapiens
caggtgggggaggggcgtcatttcactaggggccgagttttatcatcgtcaccgcactggtgagctttgtactttttcacttctgccatgtacttggcccacgcgtcacctttacttgttaatacctcatcctccgtcttctgcttcttggctactattcccgtcttgagggctagtttgttcccgcctctgcgtttgcccacgaa

SEQ ID NO: 1397 - DNA, 313 bp, Homo sapiens
ctgccaacaccaagattggcccccgccgcatccacacagtccgtgtgcggggaggtaacaagaaataccgtgccctgaggttggacgtggggaatttctcctggggctcagagtgttgtactcgtaaaacaaggatcatcgatgttgtctacaatgcatctaataacgagctggttcgtaccaagaccctggtgaagaattgcatcgtgctcatcgacagcacaccgtaccgacagtggtacgagtcccattatgcgctgcccctgggccgcaagaagggagccaagctgactcctgaggaagaagagatttt

SEQ ID NO: 1398 - DNA, 151 bp, Homo sapiens
ctgggagcatcggcaagctacagccttaaaatctgagctcctcaagtgcacaatttctgtcccttttaagggctcacaacactaaagatttcacatgaaagggtcgtgattgattgagcaatctaggggatatgtgacaggggtttcatgc

SEQ ID NO: 1399 - DNA, 654 bp, Homo sapiens
  misc_feature (1)...(654): n = A,T,C or G
aaagagcttatcctcanaaataagcttcgtcttgagttgttgaactacaaaacactattttctgcagtcatccgaagaattgtgccattacttgtgatgcctctgaatgtggaggctgactctcccgtctctctgtccctcctaccccacggggccgcagcaaaagccatcctgggccttcgactgggccatgtcttcaggaagattcctgaagaggagggcccgaaatacctgcctttataggttcccagagtgccctagaacattcttagatacatattttttaaacaagtaggactccaccttattttctccaatagtccccaagcagtacaggtcacttgaagacataaacattcttcttggttgagggatccacgcccttgtttcagaaatgacaccacanaaggctgtgaactncaggagcatcnttgggatgtnccggatgaaccggggtttaaaggttttctatttcnataaacctgtcncacttgtccgggaatgggggggaaacntnttctntaataggcaccaaccnctantacaaancantggtngccnttnaccacattggngaacttcccggccctaagntgggctngcncaactttaattttatngancanaaaaataaacgttttntcnttggannga

SEQ ID NO: 1400 - DNA, 342 bp, Homo sapiens
ctgctgatacccaggcagtagctgatgctgtcacctaccagctcggtttccacagcattgaactgaatgagcctccactggtccacacagcagccagcctctttaaggagatgtgttaccgataccgggaagacctgatggcgggaatcatcatcgcaggctgggaccctcaagaaggagggcaggtgtacccagtgcctatggggggtatgatggtaaggcagtcctttgccattggaggctccgggagctcctacatctatggctatgttgatgctacctaccgggaaggcatgaccaaggaagagtgtctgcaattcactgccaatgctctcgctttgg

SEQ ID NO: 1401 - DNA, 121 bp, Homo sapiens
ctgaggccaaggagtgaaaaacctattactactaagagaaggggtgcagagtgtttacctggtgctctcaacaggacttaacatcaacaggacgtaaaaaaaaaaaaaaaaaaaaaaaaaa

SEQ ID NO: 1402 - DNA, 391 bp, Homo sapiens
  misc_feature (1)...(391): n = A,T,C or G
aaaaataagaaaatacataagaccataacagccaacaggtggcaggaccaggactatagcccaggtcctctgatacccagagcattacgtgagccaggtaatgagggactggaaccagggagaccgagcgctttctggaaaagaggagtttcgaggtagagtttgaaggaggtgagggatgtgaattgcctgcagagagaagcctgttttgttggaaggtttggtgtgtggagatgcagaggtaaaagtgtgagcagtgagttacagcgagaggcagagaaagaagagacaggagggcaagggccatgctgaagggaccttgaagggtaaagaagtttgatattaaaggagttaagagtagcaagttctanagaagaggctggtgctgtgg

SEQ ID NO: 1403 - DNA, 523 bp, Homo sapiens
  misc_feature (1)...(523): n = A,T,C or G
agcatggtcaccgccatgggttagagccctgctcgatgctcacagggcccccagcgagagtccctgcagtccctttcgacttgcatttttgcaggagcagtatcatgaagcctaaacgcgatggatatatgtttttgaaggcagaaagcaaaattatgtttgccactttgcaaaggagctcactgtggtgtctgtgttccaaccactgaatctggaccccatctgtgaataagccattctgactcatatcccctatttaacagggtctctagtgctgtgaaaaaaaaaaaatgctgaacattgcatataacttatattgtaagaaatactgtacaatgactttattgcatctgggtanctgtaaggcatgaaggatgccaanaatttaaggaatatgggaaaaatagtgtggaaattaaaaaaaacttnggctgattttcaaatggacaaactgccnnttttntttccttttnctggacctncccgggngggccgttnnaaggggnaaattccncccacttgg

SEQ ID NO: 1404 - DNA, 473 bp, Homo sapiens
  misc_feature (1)...(473): n = A,T,C or G
ctccaggcgccctcggccgcccatcatggttaattctgtccaacaaacacacacgggtagattgctggcctgttgtaggtggtagggacacagatgaccgacctggtcactcctcctgccaacattcagtctggtatgtggggcgtgcgtgaagcaagaactcctggagctacagggacagggagccatcattcctgcctgggaatcctggaagacttcctgcaggagtcagcgttcaatcttgaccttgaagatgggaaggatgttctttttacgtaccaattcttttgtcttttgatattaaaaagaagtacatgttcattgtagagaatttggaaactgtngaagagaatcaagaagaaaaataaaaatcagacctcggccgcgaccacgctaagggcgaattccacacacttgcgggccgttctatggatcccaacttcggncccaaccttggngtaatcattggcata

SEQ ID NO: 1405 - DNA, 267 bp, Homo sapiens
ccctaacttagatggtttttgaagcctatacaattggtattgttcgacccttaagcttttacatctcttagcatggaggacgaagaaagctgtacattgttgcttgagagtctgtacatttagtccagatttgtatttgcactgtcagtatggcaaatgagtgaaaaatgtttaatacactattggattttttatttcctttttttgattcagcttatacccgggctgaaaacctcaatttatgttcatgacagtggggattttttt

SEQ ID NO: 1406 - DNA, 298 bp, Homo sapiens
tgaaaaccttgaaaactattacctggaggtcaatcaacttgagaagtttgacataaagagcttctgcaagatcctggggccattatcctactccaagatcaagcatttgcgtttggatggcaatcgcatctcagaaaccagtcttccaccggatatgtatgaatgtctacgtgttgctaacgaagtcactcttaattaatatctgtatcctggaacaatattttatggttatgtttttctgtgtgtcagttttcatagtatccatattttattactgtttattacttccatgaatttt

SEQ ID NO: 1407 - DNA, 329 bp, Homo sapiens
gaggcaaattggtttacaccttcatgtaattcttttactttaggggttgtaaagctactttattagatatagaatggcagattctctgatttaaaagggctgagtttgtattattactgatatgaagaatagagtaccaatgtcattaattgatttttcttgttaatcagaattcctattctgtacctttcctctaacttctcagatttgtaattcttcttttgggagctgagctagtgcttttaggagaacagataaatgtggtctcagccagccctagagactgcttcttgtgtttgtgtcattctgtcctgagaaatgaagtcatc

SEQ ID NO: 1408 - DNA, 123 bp, Homo sapiens
tcccaaccctggcttggggtcaagaaacagccagcaagagttaggggccttagggcactgggctgttgttccattgaagccgactctggccctggcccttacttgcttctctagctctctagg

SEQ ID NO: 1409 - DNA, 674 bp, Homo sapiens
  misc_feature (1)...(674): n = A,T,C or G
cttgtgaaaccctggaaatcttaagtctgttgaaataccaggttaaacacattccaagagatctgttcaaactcaaattcttttgtatacttctgaggtgcctgagaaaaagacttcattatttatgagaaaatatgctttatcttggaaattgtgttcaaatgttagcttactattttgtagaatgaatgtttatgaagctgatatgagaccatctcagaagaaccaagcaggttccttgaccttttgcttgcttttctgaacattgtgaatattacacatgtctttctaaattattctagggtatgcaaatgtcaatggtatgaaacaccactgtctggaagaattaatatattactttagtatgtacctgagctaaatgactgaagctttaggggtgcatagaaaccaccataatttgtatgacattttgaagtgaattaaatatttttgaacatgcttcttcgacagccagtgttatatttttcagaatcaccccaagcacaatggattactcgaaatcagtnttttcaaattacatatttnaaggcatgccaacttgactttcctgtnaaaaatactggctgccaaattattcctttttttttaaacttnggccgnnaacccccttanggngnaattccnccccctggngggccnttcttangggatcc

SEQ ID NO: 1410 - DNA, 570 bp, Homo sapiens
  misc_feature (1)...(570): n = A,T,C or G
ccagagcaggagggagacagaggggaggcaccacacactttgaagcaaccagatgtgatgaggactcaatatcaggagaacagcactgagcgggtggtgctaaaccgtttgtgaggactctgccccataatcccatcgcctcccaccagggggcttacatttcaacatgagactcggtgaggacacagatccaaaccacatcaatagtgctttcatgcttttgattatcttttgtaactatgttattgaactataatttacataccatacaattcaccaacgtaaagtgtgtaattcaatggtcttaagcatattcagagttgtgtggccatcgctacagtcaattttaggacatttttatcactgcaaaagaaagacctcaatcttcccattcctcccatcccgaacaaccactaatctacttctctatatggagatttgcttattctggacattttacctgcccgggccggccgctcgaaagggcgaaattccancacacttggcggnccgtactaatgggatcccaacttcgtncccaanctttggngtaatcattgggcatnactt

SEQ ID NO: 1411 - DNA, 226 bp, Homo sapiens
  misc_feature (1)...(226): n = A,T,C or G
aaaaaaaaaaagaanaagaaggtttatacacactgtncacacatttacaatggctttggaggatagcagtgctgcnaaaagggcttcaggaggatccggcctgggacaggattgaggtatgttgcagcctccagggcctggggtctcctgcatgaaaaatacccctccccatttgactgtgaactttttggcctggattctggagaacanatttccaggattgtca

SEQ ID NO: 1412 - DNA, 204 bp, Homo sapiens
ctggacgcgcggcctctggtcagtcctggaagtgcttggtgagggcttccagcagctcctgcttcttcagaccactcttcagcccgtaagcccggcaggcctctttcagcatgggcacagtgaacttgcccagcgtacccttgctgatgtgggtcttcagctcctcttctgaatactccaccttgggccttttgcttccagaac

SEQ ID NO: 1413 - DNA, 622 bp, Homo sapiens; identical to SEQ ID NO: 965
  misc_feature (1)...(622): n = A,T,C or G

SEQ ID NO: 1414 - DNA, 609 bp, Homo sapiens; identical to SEQ ID NO: 1025
  misc_feature (1)...(609): n = A,T,C or G

SEQ ID NO: 1415 - DNA, 390 bp, Homo sapiens; identical to SEQ ID NO: 977

SEQ ID NO: 1416 - DNA, 289 bp, Homo sapiens; identical to SEQ ID NO: 1354

SEQ ID NO: 1417 - DNA, 468 bp, Homo sapiens; identical to SEQ ID NO: 1368

SEQ ID NO: 1418 - DNA, 591 bp, Homo sapiens; identical to SEQ ID NO: 558
  misc_feature (1)...(591): n = A,T,C or G

SEQ ID NO: 1419 - DNA, 699 bp, Homo sapiens; identical to SEQ ID NO: 297
  misc_feature (1)...(699): n = A,T,C or G

SEQ ID NO: 1420 - DNA, 646 bp, Homo sapiens; identical to SEQ ID NO: 315
  misc_feature (1)...(646): n = A,T,C or G

SEQ ID NO: 1421 - DNA, 364 bp, Homo sapiens; identical to SEQ ID NO: 250
  misc_feature (1)...(364): n = A,T,C or G

SEQ ID NO: 1422 - DNA, 668 bp, Homo sapiens; identical to SEQ ID NO: 358
  misc_feature (1)...(668): n = A,T,C or G

SEQ ID NO: 1423 - DNA, 632 bp, Homo sapiens; identical to SEQ ID NO: 172
  misc_feature (1)...(632): n = A,T,C or G

SEQ ID NO: 1424 - DNA, 318 bp, Homo sapiens; identical to SEQ ID NO: 1005
  misc_feature (1)...(318): n = A,T,C or G

SEQ ID NO: 1425 - DNA, 269 bp, Homo sapiens; identical to SEQ ID NO: 70
  misc_feature (1)...(269): n = A,T,C or G

SEQ ID NO: 1426 - DNA, 481 bp, Homo sapiens; identical to SEQ ID NO: 889
  misc_feature (1)...(481): n = A,T,C or G

SEQ ID NO: 1427 - DNA, 589 bp, Homo sapiens; identical to SEQ ID NO: 532
  misc_feature (1)...(589): n = A,T,C or G

SEQ ID NO: 1428 - DNA, 176 bp, Homo sapiens; identical to SEQ ID NO: 1263

SEQ ID NO: 1429 - DNA, 628 bp, Homo sapiens; identical to SEQ ID NO: 192
  misc_feature (1)...(628): n = A,T,C or G

SEQ ID NO: 1430 - DNA, 234 bp, Homo sapiens; identical to SEQ ID NO: 397

SEQ ID NO: 1431 - DNA, 449 bp, Homo sapiens; identical to SEQ ID NO: 1356

SEQ ID NO: 1432 - DNA, 359 bp, Homo sapiens; identical to SEQ ID NO: 556
  misc_feature (1)...(359): n = A,T,C or G

SEQ ID NO: 1433 - DNA, 536 bp, Homo sapiens; identical to SEQ ID NO: 142
  misc_feature (1)...(536): n = A,T,C or G

SEQ ID NO: 1434 - DNA, 640 bp, Homo sapiens; identical to SEQ ID NO: 341
  misc_feature (1)...(640): n = A,T,C or G

SEQ ID NO: 1435 - DNA, 731 bp, Homo sapiens
  misc_feature (1)...(731): n = A,T,C or G
cagtgaattgaatacgactcactatagggcgaattgggccctctagatgcatgctcgagcggcccgccagtgtgatggatatctgcagaattcgcccttagcgtggtcgcggccgaggtttttttttggagagaaagcagccagaaaaatccgacttttatttcttaaatactgtgaaggaagaggggggaaacggtcccctgatgaggaagggccatagagcaaagagctaaggatcatcagcaaaggcccgctgggcattggggaagcgctccagcaagtactatgtgactatcattgatgccccaggacacagagactttatcaaaaacatgattacagggacatctcaggctgactgtgctgtcctgattgttgctgctggtgttggtgaatttgaagctggtatctccaagaatgggcagacccgagagcatgcccttctggcttacacactgggtgtgaaacaactaattgtcggtgttaacaaaatggattccactgagccccctacagccagaanagatatgaggaaattgttaaggaagtcagcacttacattaaaaaaattggctacaaccccgacacagtagcatttgngccaatttctggttggaatggngacaacatgcntggaaccaaangctaacatgccttggttcaagggatggaaagtcccccgtaaggatggcaatgcccagngaaccncnctgnttgagggtntggactgg

SEQ ID NO: 1436 - DNA, 638 bp, Homo sapiens; identical to SEQ ID NO: 110
  misc_feature (1)...(638): n = A,T,C or G

SEQ ID NO: 1437 - DNA, 228 bp, Homo sapiens; identical to SEQ ID NO: 208
  misc_feature (1)...(228): n = A,T,C or G

SEQ ID NO: 1438 - DNA, 286 bp, Homo sapiens; identical to SEQ ID NO: 1145

SEQ ID NO: 1439 - DNA, 274 bp, Homo sapiens; identical to SEQ ID NO: 1206
  misc_feature (1)...(274): n = A,T,C or G

SEQ ID NO: 1440 - DNA, 456 bp, Homo sapiens; identical to SEQ ID NO: 1058
  misc_feature (1)...(456): n = A,T,C or G

SEQ ID NO: 1441 - DNA, 282 bp, Homo sapiens; identical to SEQ ID NO: 1091

SEQ ID NO: 1442 - DNA, 379 bp, Homo sapiens; identical to SEQ ID NO: 1064
  misc_feature (1)...(379): n = A,T,C or G

SEQ ID NO: 1443 - DNA, 494 bp, Homo sapiens; identical to SEQ ID NO: 346
  misc_feature (1)...(494): n = A,T,C or G

SEQ ID NO: 1444 - DNA, 271 bp, Homo sapiens; identical to SEQ ID NO: 771

SEQ ID NO: 1445 - DNA, 533 bp, Homo sapiens; identical to SEQ ID NO: 166
  misc_feature (1)...(533): n = A,T,C or G

SEQ ID NO: 1446 - DNA, 427 bp, Homo sapiens; identical to SEQ ID NO: 1394
  misc_feature (1)...(427): n = A,T,C or G

SEQ ID NO: 1447 - DNA, 275 bp, Homo sapiens; identical to SEQ ID NO: 710

SEQ ID NO: 1448 - DNA, 627 bp, Homo sapiens; identical to SEQ ID NO: 381
  misc_feature (1)...(627): n = A,T,C or G

SEQ ID NO: 1449 - DNA, 479 bp, Homo sapiens; identical to SEQ ID NO: 169
  misc_feature (1)...(479): n = A,T,C or G

SEQ ID NO: 1450 - DNA, 291 bp, Homo sapiens; identical to SEQ ID NO: 1186

SEQ ID NO: 1451 - DNA, 370 bp, Homo sapiens; identical to SEQ ID NO: 472
  misc_feature (1)...(370): n = A,T,C or G

SEQ ID NO: 1452 - DNA, 595 bp, Homo sapiens; identical to SEQ ID NO: 619
  misc_feature (1)...(595): n = A,T,C or G

SEQ ID NO: 1453 - DNA, 698 bp, Homo sapiens; identical to SEQ ID NO: 21
  misc_feature (1)...(698): n = A,T,C or G

SEQ ID NO: 1454 - DNA, 385 bp, Homo sapiens; identical to SEQ ID NO: 1136
  misc_feature (1)...(385): n = A,T,C or G

SEQ ID NO: 1455 - DNA, 550 bp, Homo sapiens; identical to SEQ ID NO: 2
  misc_feature (1)...(550): n = A,T,C or G

SEQ ID NO: 1456 - DNA, 479 bp, Homo sapiens; identical to SEQ ID NO: 287

SEQ ID NO: 1457 - DNA, 569 bp, Homo sapiens; identical to SEQ ID NO: 235
  misc_feature (1)...(569): n = A,T,C or G

SEQ ID NO: 1458 - DNA, 227 bp, Homo sapiens; identical to SEQ ID NO: 433

SEQ ID NO: 1459 - DNA, 577 bp, Homo sapiens; identical to SEQ ID NO: 762
  misc_feature (1)...(577): n = A,T,C or G

SEQ ID NO: 1460 - DNA, 470 bp, Homo sapiens; identical to SEQ ID NO: 448
  misc_feature (1)...(470): n = A,T,C or G

SEQ ID NO: 1461 - DNA, 211 bp, Homo sapiens; identical to SEQ ID NO: 1094

SEQ ID NO: 1462 - DNA, 465 bp, Homo sapiens; identical to SEQ ID NO: 1023
  misc_feature (1)...(465): n = A,T,C or G

SEQ ID NO: 1463 - DNA, 635 bp, Homo sapiens; identical to SEQ ID NO: 947
  misc_feature (1)...(635): n = A,T,C or G

SEQ ID NO: 1464 - DNA, 234 bp, Homo sapiens; identical to SEQ ID NO: 397

SEQ ID NO: 1465 - DNA, 518 bp, Homo sapiens
  misc_feature (1)...(518): n = A,T,C or G
tgatttattcngcctccnntttggggngaattggggccctctagatgcattgctcgagcggccgccagtgtgatggatatctgcagaattcgcccttagcgtggtcgcggncgaggtaaacttacgccgcttatgtatttacacataaagttactgtatatataaaaaatattttcaaggactcatgggcttgggaatattcaaaanacattattgctacatttcaatatttacaaaaaaagccacaaaataatttcaaacattaagccactgcaaagaaacatctgatgtaagaaaaaattatnaaaatataaactntcaanaatntccaagacaaaactctcaatgaagtgcccctgaagtacctanacatctataactaacaccacttttcttactatcattgaagtcaatanaaacacaaaggaatttttcagacaaantatggnaaacaacaatntctngggngacaacacanccccaaaatctgtaactttgggaacggtncnaanaggtta

SEQ ID NO: 1466 - DNA, 733 bp, Homo sapiens; identical to SEQ ID NO: 17
  misc_feature (1)...(733): n = A,T,C or G

SEQ ID NO: 1467 - DNA, 271 bp, Homo sapiens; identical to SEQ ID NO: 983
  misc_feature (1)...(271): n = A,T,C or G

SEQ ID NO: 1468 - DNA, 391 bp, Homo sapiens; identical to SEQ ID NO: 563
  misc_feature (1)...(391): n = A,T,C or G

SEQ ID NO: 1469 - DNA, 538 bp, Homo sapiens; identical to SEQ ID NO: 288
  misc_feature (1)...(538): n = A,T,C or G

SEQ ID NO: 1470 - DNA, 317 bp, Homo sapiens; identical to SEQ ID NO: 1081

SEQ ID NO: 1471 - DNA, 450 bp, Homo sapiens; identical to SEQ ID NO: 215
  misc_feature (1)...(450): n = A,T,C or G

SEQ ID NO: 1472 - DNA, 216 bp, Homo sapiens; identical to SEQ ID NO: 911

SEQ ID NO: 1473 - DNA, 219 bp, Homo sapiens; identical to SEQ ID NO: 12

SEQ ID NO: 1474 - DNA, 255 bp, Homo sapiens; identical to SEQ ID NO: 1159
  misc_feature (1)...(255): n = A,T,C or G

SEQ ID NO: 1475 - DNA, 655 bp, Homo sapiens; identical to SEQ ID NO: 103
  misc_feature (1)...(655): n = A,T,C or G

SEQ ID NO: 1476 - DNA, 512 bp, Homo sapiens; identical to SEQ ID NO: 817
  misc_feature (1)...(512): n = A,T,C or G

SEQ ID NO: 1477 - DNA, 332 bp, Homo sapiens; identical to SEQ ID NO: 253
  misc_feature (1)...(332): n = A,T,C or G

SEQ ID NO: 1478 - DNA, 532 bp, Homo sapiens; identical to SEQ ID NO: 903
  misc_feature (1)...(532): n = A,T,C or G

SEQ ID NO: 1479 - DNA, 671 bp, Homo sapiens; identical to SEQ ID NO: 836
  misc_feature (1)...(671): n = A,T,C or G

SEQ ID NO: 1480 - DNA, 483 bp, Homo sapiens; identical to SEQ ID NO: 1346

SEQ ID NO: 1481 - DNA, 453 bp, Homo sapiens; identical to SEQ ID NO: 366
  misc_feature (1)...(453): n = A,T,C or G

SEQ ID NO: 1482 - DNA, 542 bp, Homo sapiens; identical to SEQ ID NO: 922
  misc_feature (1)...(542): n = A,T,C or G

SEQ ID NO: 1483 - DNA, 330 bp, Homo sapiens; identical to SEQ ID NO: 621
  misc_feature (1)...(330): n = A,T,C or G

SEQ ID NO: 1484 - DNA, 624 bp, Homo sapiens; identical to SEQ ID NO: 122
  misc_feature (1)...(624): n = A,T,C or G

SEQ ID NO: 1485 - DNA, 215 bp, Homo sapiens; identical to SEQ ID NO: 1108
  misc_feature (1)...(215): n = A,T,C or G

SEQ ID NO: 1486 - DNA, 271 bp, Homo sapiens; identical to SEQ ID NO: 948

SEQ ID NO: 1487 - DNA, 204 bp, Homo sapiens; identical to SEQ ID NO: 701
  misc_feature (1)...(204): n = A,T,C or G

SEQ ID NO: 1488 - DNA, 375 bp, Homo sapiens; identical to SEQ ID NO: 152
  misc_feature (1)...(375): n = A,T,C or G

SEQ ID NO: 1489 - DNA, 214 bp, Homo sapiens; identical to SEQ ID NO: 1127
  misc_feature (1)...(214): n = A,T,C or G

SEQ ID NO: 1490 - DNA, 322 bp, Homo sapiens; identical to SEQ ID NO: 1165
  misc_feature (1)...(322): n = A,T,C or G

SEQ ID NO: 1491 - DNA, 683 bp, Homo sapiens; identical to SEQ ID NO: 285
  misc_feature (1)...(683): n = A,T,C or G

SEQ ID NO: 1492 - DNA, 545 bp, Homo sapiens; identical to SEQ ID NO: 662
  misc_feature (1)...(545): n = A,T,C or G

SEQ ID NO: 1493 - DNA, 569 bp, Homo sapiens; identical to SEQ ID NO: 1245
  misc_feature (1)...(569): n = A,T,C or G

SEQ ID NO: 1494 - DNA, 344 bp, Homo sapiens; identical to SEQ ID NO: 756

SEQ ID NO: 1495 - DNA, 501 bp, Homo sapiens; identical to SEQ ID NO: 825
  misc_feature (1)...(501): n = A,T,C or G

SEQ ID NO: 1496 - DNA, 344 bp, Homo sapiens; identical to SEQ ID NO: 894

SEQ ID NO: 1497 - DNA, 190 bp, Homo sapiens; identical to SEQ ID NO: 850

SEQ ID NO: 1498 - DNA, 343 bp, Homo sapiens; identical to SEQ ID NO: 723

SEQ ID NO: 1499 - DNA, 693 bp, Homo sapiens; identical to SEQ ID NO: 886
  misc_feature (1)...(693): n = A,T,C or G

SEQ ID NO: 1500 - DNA, 290 bp, Homo sapiens; identical to SEQ ID NO: 1090

SEQ ID NO: 1501 - DNA, 301 bp, Homo sapiens; identical to SEQ ID NO: 377
  misc_feature (1)...(301): n = A,T,C or G

SEQ ID NO: 1502 - DNA, 743 bp, Homo sapiens
  misc_feature (1)...(743): n = A,T,C or G
aaaagtcacaaatcacagtgggagaatgccaaattgctttagcttggaactactgaagacgcacatagcatttattataaggcctactcttaggcagttcactctcaaagcaatgaaaataatctcaaaccaaacattacagtgggtttgaagcgttcctacgtttcttccgagcaggtcagttttacatttgctacacagcattccccacgaatgcctggtaattctatacatttgattctttaataaacactaaactaatagatcatagaaaactaaaagcttagagaaggtgcctccagacatatttacataaataacgtagcctcacaagaaagaccaagatctcattagcgtggaatgctttttccacaaggctgggtccatgcctcatttgtcarattaaccccatttgaggagaaatttgagtttgtggttcatgggtttttgaaaaaaaaaaaaaaaaaaaarggaattaagcaacttgtaaaagctcttttgaaattaatctaataacccagtggctcctcggctaagtgcctcagtcctgtctgaaatacagcgggtaagagcctttgtttccatttgacctcttttcaacactttcatctgccctgaccctcatcaggaacaagagggctccccaatccccagggcccggctcanaaggaaggggtgggagagaaggggcgagagggagcagggtgaggggcacagagctgaggctgccaacctgccccggg

SEQ ID NO: 1503 - DNA, 409 bp, Homo sapiens
ctgtaaaagatcctatgcgaaagacactggctcttttttttaatcccccaaataaattttgcccccttttaggccatgttccattatctcttaaaattggaacctaattcgagaggaagtaagaagggtctgttctgtggctgagctaggtgaaccccggggtaggggaaagatgttaacacctttgacgtctttggagttgacatggaacagcaggtagttgttatgtagagctagttctcaaagctgccctgcctgttttaggaggcgttccacaaacagattgaggctcttttagaattgaatttactcttcagtattttctaatgttcagctttctaagaggcatatatttttcaaagaagtgaggatgcagtttctcacgttgcaacctattctgaagtggttt

SEQ ID NO: 1504 - DNA, 104 bp, Homo sapiens; identical to SEQ ID NO: 1377

SEQ ID NO: 1505 - DNA, 574 bp, Homo sapiens; identical to SEQ ID NO: 382
  misc_feature (1)...(574): n = A,T,C or G

SEQ ID NO: 1506 - DNA, 542 bp, Homo sapiens
ccactcactctcggacgtagaccctggtgcacacaacgtcatccgccgtcatggtcaggatcagttccccatcgttggtcagttctctggtccacgaggtcttggggccctctcccttcaggagcttctgctcacagaccattttattctcactctcccatttcaccaggctcttacagggcctcccatccacagtctgctcctcaaactcctccccaaccttgaagttaatctctgtggtgcgcacggtggtggaggttttgatgtagaaagtgtctccctcctgtttgatctccactgctggcttggacgctgcagccacagcaatcttcctcagcatcacattcacccccagcactttgagcaattcctcgaagttttccgatcggatgattttccagttgccagagaagttgggcatggtggcggcgcgggaggcggtccccgtagactcctaggctggagcactggacactgtcttttagtcaaaagagacgtcgccgtcgccgggtcgtcaggttctggaaccaagacaagtccag

SEQ ID NO: 1507 - DNA, 386 bp, Homo sapiens; identical to SEQ ID NO: 1212

SEQ ID NO: 1508 - DNA, 286 bp, Homo sapiens
  misc_feature (1)...(286): n = A,T,C or G
ttcaaagaatcacttttaggcttacaaaaataaatatttgtcaaaatgttcaataaatattacataaaactagcagcaaaaagtatctagaaatctgtcgtgtgcaaatagttttcttcccaactatcattcccatggtcccaaataaattttagaatctagtcccatccccttcctagacaagctgcgttcaacaatctccaagagacaaagtaagattggaagtttaaggacacgcacacaagacatatatataaaatnctctgaatgtgcaataaaangaagt

SEQ ID NO: 1509 - DNA, 526 bp, Homo sapiens
  misc_feature (1)...(526): n = A,T,C or G
ggggagatggggagaggaatgatctctgcccagccccttcctttccaaaccatgcaatggaagagcccagatgggtgaagattgattttgccttaactcaagagaattcctgttctccttgtgctatgatttggacacaagattctggatacctggaacttagctgtgtactcctgtaccctaaacagtggatttgagttccagcgtttattcttttttcctttttncagatcaccatctaagttacatctttngctnaggtncanccttctcaagatctnctnnttanccccccagcccctggtgctgtctgtggtcaggtgaccttactcaggagcagatatctccttggccgccatggagcctcatccatncacacgtgcctgtannnttccagagctcactgcccttctngangngccttcccncttggctttcaacgggttntgctcactctgttctgnccagggtntttaaaaaaaannccntnanaanccggncacccanaantttaaccccttttccc

SEQ ID NO: 1510 - DNA, 422 bp, Homo sapiens
  misc_feature (1)...(422): n = A,T,C or G
aaaaaacatttcacaaataagatgtagctntccaaacaaatccattcgatgaccattatcacaactatattttattctaatttataaaacaaaaaatggttagacaagcacatgagatcaagagtcttcaacacagtggattccattttattaagaaaaaaaatagaaaacanggannccttanntngnnnnannnctncatagcatacgttatataaaattaaagttttgcttccaaaaanntgttccngtggggccggggngntgcccagngcttttgggnccancgccnaagacatgagaantttaaccntcgacttgnnatttttcataaaaactaaacatttncttatnggggtgggagtaaaaaatcttcctaggccattttnagtggcttaaaaaagggccccttttttncccct

SEQ ID NO: 1511 - DNA, 365 bp, Homo sapiens
  misc_feature (1)...(365): n = A,T,C or G
aaaanacaggnatctctgcagcaggccatgtgatgctccttaatggcctacataatccagccctcaagcacctccgtgatctctgtaaaactttcccttggtcactgtgcttcagtcacattaaccagcttgcatatttctcacattcaccaagcttgttcctgccttggggcctttgtacttaccatgttctgttctgagaatactctgcctcaagatatcctacaactatcttactgtattcagctttttttttttttttttttttttacgtcctgntgatgttaagtcctgttganagcaccaggtaaacactctgcaccccttctnttantagtaataggtttttcactccttggcctcan

SEQ ID NO: 1512 - DNA, 361 bp, Homo sapiens
ccatttgttggttcaattttgccatctgtgactggctcacattcttagacatgtcgccacctgaggggaaaaaaaaagattttgagtcagcgtaggaggtaatataatcagtataatcagggtataatagaaagtttgatgaactgagaaaatactaagaaaaaattacataatcctatcactctaacataattctttctatttctacatattcccttctaatctttttctcaattacatactattctttgaagaccatgtaaaattctatataaaaggacatataaaaggcttttttaaggctacgatttatgctaatactttatttatatctgtgaataagccactattagcaaaattg

SEQ ID NO: 1513 - DNA, 403 bp, Homo sapiens
aaaaaacatttcacaaataagatgtagctttccaaacaaatccattcgatgaccattatcacaactatattttattctaatttataaaacaaaaaatggttagacaagcacatgatatcaagagtcttcaacacagtggattccattttattaagaaaaaaaatagaaaacaagtagtccttaaattgtcttagctctccatagcatacgttatataaaattaaagttttgcttccaaaaatatgtttccatgtggtcgtggtgttgtccagtgctattagggccaaagcaccaaagacatgagaagtttaaccatcgacttgtcatttttcataaaaactaaacatttccttataggtctggagtaaaatcttctaggcattttagtgctaaaagtcacttt

SEQ ID NO: 1514 - DNA, 62 bp, Homo sapiens
ggcatggttgtggttaatctggtttatttttgttccacaagttaaataaatcataaaacttg

SEQ ID NO: 1515 - DNA, 265 bp, Homo sapiens
  misc_feature (1)...(265): n = A,T,C or G
tttaaataaaaattgtaaagcactccattcaatnaaagcacataagtccccctcaataattagtatgacaattcacgatacagctcttactctgggagagtttattttaccctttattccaaaaggcacaaagtcatctgaggcctcagatattaaccccactgcatgttaatgacacaccactgaggtgcagctcaatgtaattattaaagcttataacacacttccccaagaatttatagattctttctataaataataattt

SEQ ID NO: 1516 - DNA, 522 bp, Homo sapiens
  misc_feature (1)...(522): n = A,T,C or G
ccataaacacagaagatggttttggctttacattgacacatttctgtgtgtcaatgtagaagagaaaagaagtttaattataccttttaagcaggcaaaccattataataaactgctttagaaattactttaaaattatacacatttggaacaacagattttttaaaaaatgaagtttggtgttatgtcagcattttaactatttttgctatagcgaggcctcctcatatattatcataatttatcatagtttaaatagtgaatcatattctgatattctgattaataatcatattaattttgacaatgattttagtttttgaagttttagactgcaatacttaaaaaggccataatctactttaattaccttcatcctagattattaactataaataaaatgtttatatgatatttggattaggtacatggtacaatatctgtttttacctgnaagcatgaaaatgtcttaaaaggtaaantaanaacagccaaaaggtagtgnntttttaccctcgggcc

SEQ ID NO: 1517 - DNA, 248 bp, Homo sapiens
gttgtagcatgtgtcaattttcttcttttttaaggctgaataatatttcattggatgtctataccatgttttgtttatccatggtctgtcgatggacaccaatgttgcttccatcctttggctattgtgaataatgctcctgtgaacatgggtgtacaaatatctcttcaagaccctaaaggtggaactgctggacgatgtggtagcagagtagctattttaaccttttcattataaagaaacctttt

SEQ ID NO: 1518 - DNA, 322 bp, Homo sapiens
  misc_feature (1)...(322): n = A,T,C or G
ttttatttttttaccaattccaatttnnaaatgtctcaatggtgctataataaataaacttcaacactctttatgataacaacactgtgttatattctttgaatcctagcccatctgcagagcaatgactgtgctcaccagtaaaagataacctttctttctgaaatagtcaaatacgaaattagnaaagccctccctattttaactacctcaactggtcagaaacncagattgtattctatgagtcccagaagatgaaaaaaattttatacgttgataaaacttataaatttcattgattaatctcctggaagattggttt

SEQ ID NO: 1519 - DNA, 339 bp, Homo sapiens
ctgatctctacacgccaccacctgtttcatgtgcatgggaagagtaaaaaatgaacccggataaaataaaacaaaagcaaacaaaatgctaaatcattggttattatccacatcaaataagtctggttctgtggaatatctaaaagtcacagttttatgcctttaactactatacataagggatgactttttaacctccagggcttatacaacaaaacacacctcagaagcttatataacaatatactactttttccattttatcaacaattcagcctgccttaagctacaaagtaaaataattagacaactgtgatatcaaaacaaagattatgtaag

SEQ ID NO: 1520 - DNA, 189 bp, Homo sapiens
ctgcaggcagtggggacttggggactagaacaggcagggaggtggagagctattctggtgggatgtcctaggggctgatgaaagtgagccttgacagcagctttgttctaaaggagcttaaagagaaagcagtggccgggcgcagtggctcaagcctgtaatcccagcaccttgggaggccgaggcggg

SEQ ID NO: 1521 - DNA, 445 bp, Homo sapiens
  misc_feature (1)...(445): n = A,T,C or G
gttggactgcaaattgagtttctttctctttaggcctttcacaactaggactgagaatgtatgcaaaagttctgtgacagtacagaaggaaaacaactttttatgtatagcttctaaaagggaaaaaaaaaaaaaaagagaaaccctttgacttccacgtgcccatctcaagacattccactcacagatttgaggttctggattccaggtctggagttttccaatgttaatgtaaacagaactggcacacacacattaagatgaatgtaattattattcctcttgctggtcactaccgtcgctttctatttctctttctttgtgtgaatttatttaaaagaaaaaaaaactttttgtaacgactatttgcagtttaaaaatcaataaaccccgttttttcaagaancgaaaaaaaaaaaaangaaaaaaaaaaaaaagcttgtac

SEQ ID NO: 1522 - DNA, 349 bp, Homo sapiens
  misc_feature (1)...(349): n = A,T,C or G
cattnngatgacagcctacccagatgtggccccgaggaaggatcaatagataaattatccaccagtgtatccagctcaagtaccttcaactgagttaaattcatattagtgtgtttttccaaaacatgaatttcatgagccaatatgtcagcaacatagatatacttatcatcaggtgaaatattgatcccatttcctgaatcaaatccttctgctaccactttaacttcatttggactgtagtaaacaacatttgcccagtgtaagttcaagtatgtttctaaatactttaagaaaggatcagagaagtagtggtcatttgtggcatagaaatgtgccggtccaacag

SEQ ID NO: 1523 - DNA, 157 bp, Homo sapiens
tatgcagattatttgcccaaagttgtcctcttcttcagattcagcatttgttctttgtcagtctcattttcatcttcttccatggttccacagaagctttgtttcttgggcaagcagaaaaattaaattgtacctattttgtatatgtgagatgttt

SEQ ID NO: 1524 - DNA, 451 bp, Homo sapiens
aaaatctctggcttcaaagtttcttggggaaaggtcggtttacctcacattttttgtttccattagtaatattctaggtacctcacaaaatgtattatggtgccatggctgttagtttttagcgagtgctgtaggattaattcgaaaataggcagaattccattcctcccaaggtggcaaaaattagctatactgatgtaattgtcatttacctgggtatgaattccctgacacacattcatgtcaacatatgtagcaaattttgtgaaaacataacaatttgaagcttctgtaattttgagcactgctctaacaacaagcataatataaaattagttagattttgcaagtctacaaatgagctcttgcaacagaactcacagcctttttacttttttcccctaactttagcaatgtagtatcttgagccattaatttttgggtttttttt

SEQ ID NO: 1525 - DNA, 229 bp, Homo sapiens
tatagcctgcgcgctccaggactgcctacccagcactaccccaaacccccagttccaaacccgagacttcaggcccgcccccttacgcgttgtctcattccaccaaattcagaatatttacacaatgccttcatgattttatttttctggaaattgaagtgtcaattgggttctcaatatttcatgactccaaggatgcattaaatatttatttgtggtaagagaagat

SEQ ID NO: 1526 - DNA, 571 bp, Homo sapiens
  misc_feature (1)...(571): n = A,T,C or G
ctgacatccggcctgcttcttctcacatgacaaaaactagcccccacctcaatcatataccaaatctctccctcactaaacgtaagccttctcctcactctctcaatcttatccatcatagcaggcagttgaggtggattaaaccaaacccagctacgcaaaatcttagcatactcctcaattacccacataggatgaataatagcagttctaccgtacaaccctaacataaccattcttaatttaactatttatattatcctaactactaccgcattcctactactcaacttaaactccagcaccacgaccctactactatctcgcacctgaaacaaactaacatgactaacacccttaattccatccaccctcctctccctaggaggcctgcccccgctaaccggctttttgcccaaatgggccattatcggaagaattcacaaaaaacaatagcctcatcatccccaccatcatagccaccatcaccctccttaacctctacttctacctacgcctaatctactccacctcaaatacacttactnccccataatctaacaacgtaaaa

SEQ ID NO: 1527 - DNA, 171 bp, Homo sapiens
  misc_feature (1)...(171): n = A,T,C or G
gtgtgagcaaccagtgtagtgactctttggttcattattcgtgttgtttttatncttagtcantgtgtgacccaacagtggcaggggttacaaccccctctcctttcttttttgtatttatctatttgtaggattgtcagatcaagtacaanatgcccacttaagtttgaa

SEQ ID NO: 1528 - DNA, 571 bp, Homo sapiens
  misc_feature (1)...(571): n = A,T,C or G
aaataacatcaactcacaaatgacttttagaagccaaataaacatttctattttagagaatagtatgtaatacataacttaaaagcatatagaacacatattcctacattcttaaaaataagagattgtgattccacagagaatttttcaaatatctaaagtatgtcctgttaaaccaacaatttgcttccaaacaggagtctcttttgagaagctaaatattaattttcaaacaactatttctccatttgttaactggaatcattcatattaaaacaaaggtctttatgtcaatgtatgttaatatggctgaaggctccagccctgagttatttttttacttccttaaattcataattacaacatatatcaatttgaggtatcatgacaaaaacagaaacaaaagacacaatggtagatgagaatctatctccctgtggaagaggcaaaattagtgtggacctcatttttctgacctataaaactaggaagtataatcacattacttgcgacaattttttcttctaaaatgcctgaatttgaanggagactctgccttctccctgcccgg

SEQ ID NO: 1529 - DNA, 621 bp, Homo sapiens
ctgacttcttttcaagttcccacattaggacattgatcagatgtgaatttttaattacaatcggcacttcttcaaacatgtactcaaaggtgatatttgcttttttcaatgcttcaggggaaaaatccttttctttacaaacttccatcagtttaggagtcagtctgtatgcctttagtgagagagatccttgggcagtttttatgggatcataaatgagaacgacagattcttcaatggcatgctggtaactaaactgagagtccaggagtgcccgggtaacgaatgagccatagtatgtggactgataccagcccacgtgaagatgatcaatgtttacatggcgaaggctccgcatcatttccatctgatattggacttcatcaaagtcagcatcatcctctgtgtgttgagggaaaggaaagcagttggtaatttcaagccgatcttctacaaccagacccaaaagcactccttgaacaacttcagttccttgtccttcttcttgataatgtttgattatctttaataccacaaggccatctatctgcacttgcttcacggctgaatctcccgagccgcctttgcctttgcctttccctgctgcgccggcggtggagc

SEQ ID NO: 1530 - DNA, 325 bp, Homo sapiens
  misc_feature (1)...(325): n = A,T,C or G
aaaaactgattacagcaaatgaaacacngttgtctaagtgatatagtatacaaaaataacatcttgatttctgtgaaaatgcatttctctgcaattcctgaatagctccaaattatgctaactctgagcattgatgtttactctgggttttagatttaggtctttgaaaataatgtgttctaaacctttgccatcaccatctatgtgtccaacatcaacactgtgatgaagttgttcctgtttaggcttttattccgatttctctcgaacagccattaacatgcatgttnatctttttgtttactcccactcaactgtatgtnct

SEQ ID NO: 1531 - DNA, 669 bp, Homo sapiens
  misc_feature (1)...(669): n = A,T,C or G
aaaccaatcttccaggagattaatcaatgaaatttataagttttatcaacgtataaaatttttttcatcttctgggactcatagaatacaatctgtgtttctgaccagttgaggtagttaaaatagggagggcttttctaatttcgtatttgactatttcagaaagaaaggttatcttttactggtgagcacagtcattgctctgcagatgggctaggattcaaagaatataacacagtgttgttatcataaagagtgttgaagtttatttattatagcaccattgagacattttgaaattggaattggtaaaaaaataaaacaaaaagcatttgaattgtatttggtggaacagcaaaaaaaagagaagtatcatttttctttgtcaaattatactgtttccaaacattttggaaataaataactggaattttgtcggtcacttgcactggttgacaagattagaacaagaggaacacatatggagttaaattttttttgttgggatttcagatagagtttggtttataaaaagcaaacagggccaacgtccacaccaaattcttgatcaggacccccaatgtcataggggngcaatatctaccaatanggtagtctcncagcccttgccgtgttcgatattccaaagactggntttgctccattccc

SEQ ID NO: 1532 - DNA, 199 bp, Homo sapiens
ggtacaacctgcaaattacttgcagttctgagtttcagataaaacattataaaacattaaattcaatacatactgctcctttgaaatttgggtaaaaaattgtacaaccgtatatatagtcatttttgtattttttctatgttgtgaaaaccaaaattgtaattttataagtctttgattcactaaaattatataattt

SEQ ID NO: 1533 - DNA, 301 bp, Homo sapiens
  misc_feature (1)...(301): n = A,T,C or G
ttttttttttttttttttccttggaccataaatttttattggcaggtcagganaanagccgggggtaanagtcccttccttcccatccctctacccanaanacaccctccaaaggacagcanaagccccanagcctgctgcctcanaggaccttggaggcanacaaattgttgtagngatcttcctgtccctcnagcaggctgcggtaggnggcaatctcctgctccagccgcgacttgatgtccatgagccgctggtactcctgattctgccgctcactatcagctcgcacatcgcccan

SEQ ID NO: 1534 - DNA, 450 bp, Homo sapiens
  misc_feature (1)...(450): n = A,T,C or G
ccaccacatctttattgcatactcaggtgaataacttattatacaatgaacactcctccattaggagaccatgcccacttacagaatgcagccgtaaatgcggtaaatctatttacagaggttggggtgcaagatgagagaagtatcagccccaggaatttgaagtgagaatgatctacaaattctcctgacaaggagcaaccgggcttgtgctagtgaggtctgaaagaattcctggcagagcgtagggggagattagatctcggaattgacagcaagtttggggacagtgcaagaagagaggggtgacctgtgaattggtgctggggagctgctgaggcccaatgtgaggcagcactagagagatgagtaaatttagggtgatctttagcctctcctacccaggcaagaagggttggggagcgggggtgccancaagttggcttccag

SEQ ID NO: 1535 - DNA, 451 bp, Homo sapiens
aaaaaaaaaatcaaaggcaatcattctaaatgtactatgatagcatgttaaagatgcaagtatgctatagaaccaaagtaatatgaacagcactactcattacctaggagaaaggtgactggttttcacacaaagctaagcctgtaacagtcatcctaatcacaatggcttataaaagcatcaggtttccagtagagaaactattctaggaaagtcagtaaatctcttgaaagtttcacatctgtaaaaccaggataaggctacaactattttgaaatctgaacaaggtatcagatgaaagagtaagattcccagccataatgtaagatagaaaggtcctcatgcagcatatgctcgctggctccgggaaggcttcacgtgcataatacagaagttgccaaagaaggaaactggagacgttcagctacatttccatggtgccgtgaatttt

SEQ ID NO: 1536 - DNA, 365 bp, Homo sapiens
ccacagctaacatcattgcagcacctttactccttcggctttttgccagcaccaacattggcctttgcagtccccctgactttcttcattctgttcttgcgttcctttcgttgctttcctgaggtctttttcttctcatacaggccatgtcttgcaagtctatgtttgggttcatttttctttgcataatccagggaatcataaatcatgccaaagccagttgtcttgccaccaccaaaatgagttctgaatccaaatacgaagatgacatccggtgtggtcttgtacattttggctagtttttcccgaatttctgtcttaggcactgtcgccttcccggggtgaaggacatcaatgaccatttg

SEQ ID NO: 1537 - DNA, 263 bp, Homo sapiens
ctgttgcacacttggactgtcaccttctccaggctggcagttgatatcttattttttttccaactcatttttattaaaaaaataaaaaaatgctccaactatcagctttacaaaatctctaagggaaacacaagagcaaggtgctgaggtaaaaacacctgaggtagcttcttctgtgtgtttttctcgttaaaaaaatctgtgaatttaacgccctgggccaacaaccttggtaaatttctactttcctccacatttttttt

SEQ ID NO: 1538 - DNA, 181 bp, Homo sapiens
  misc_feature (1)...(181): n = A,T,C or G
ccagagtgaccaggctgaccagcaccanccctgatccanatgcanaggccaggatgtgggcccagccctgtgccaggaggctggctggaataaaggtacagatagaggcctcaccccctctgggaccactggcactcagggtgtttgcagcctcagagcccacctgcccccagggccacag

SEQ ID NO: 1539 - DNA, 341 bp, Homo sapiens
catcatcgatgtggcccccttggacgttggtgccccagaccaggaattcggcttcgacgttggccctgtctgcttcctgtaaactccctccatcccaacctggctccctcccacccaaccaactttccccccaacccggaaacagacaagcaacccaaactgaaccccctcaaaagccaaaaaatgggagacaatttcacatggactttggaaaatattttttcctttgcattcatctctcaaacttagtttttatctttgaccaaccgaacatgaccaaaaaccaaaagtgcattcaaccttaccaaaaaaaaaaaaaaaagaataaataaataactttt

SEQ ID NO: 1540 - DNA, 230 bp, Homo sapiens
  misc_feature (1)...(230): n = A,T,C or G
ctgccgacggagagtctcattttggnaagtatccgagcaaaaccaaaacaaaacaaaaaccaaataaaatggtggtttagcagagacgcgcacattcacattgcacaaggcactgctggggcacagaggccagatacaagtgttgatatcggctggtaaagcaaaatatttggaaagcttgtcataactccggtccctctgggatggactgatcgtgcttcgtgttccta

SEQ ID NO: 1541 - DNA, 507 bp, Homo sapiens
  misc_feature (1)...(507): n = A,T,C or G
tgttattgctgttattgtggttgtggtgatagcagttgttgctggaattgttgtgctggttatttccagaaagaagagaatggcaaagtatgagaaggctgagataaaggagatgggtgagatgcatagggaactcaatgcataactatataatttgaagattatagaagaagggaaatagcaaatggacacaaattacaaatgtgtgtgcgtgggacgaagacatctttgaaggtcatgagtttgttagtttaacatcatatatttgtaatagtgaaacctgtactcaaaatataagcagcttgaaactggctttaccaatcttgaaatttgaccacaagtgtcttatatatgcagatctaatgtaaaatccagaacttggactccatccgttaaaattatttatgtgtaacattcaaatgtgtgcattaaatatgcttccacagtcnaaaacagnaccaaanaanncacngaanaaaaancntacnnnnaaannnnnanngnttg

SEQ ID NO: 1542 - DNA, 371 bp, Homo sapiens
gagaaactgtgtgtgaggggaagaggcctgtttcgctgtcgggtctctagttcttgcacgctctttaagagtctgcactggaggaactcctgccattaccagctcccttcttgcagaagggagggggaaacatacatttattcatgccagtctgttgcatgcaggctttttggcttcctaccttgcaacaaaataattgcaccaactccttagtgccgattccgcccacagagagtcctggagccacagtcttttttgctttgcattgtaggagagggactaagtgctagagactatgtcgctttcctgagctaccgagagcgctcgtgaactggaatcaactgcttcagggaaaaaaaaaaaaaaaaaaa

SEQ ID NO: 1543 - DNA, 245 bp, Homo sapiens
  misc_feature (1)...(245): n = A,T,C or G
tcttttctgaaaaaaaaaaaaaaagggaaaaaaaaaangcttgtncaaaaaaacttttttttgccatccatcctgtgcaatatgccgngtaaaatatttgncttaaaattcaaggccacaaaaacaatgtttgggggaaaaaaaanaaaaaatcatgccagctaatcatgtcaagttcactgcctgtcaaattgttgatatataccttctgtaaanaactttttttganaaggaaataaaatcan

SEQ ID NO: 1544 - DNA, 98 bp, Homo sapiens
  misc_feature (1)...(98): n = A,T,C or G
ctgactaaactttttttctgtaccngttaatttttccaactactaatagaataaaggcagttttctaaacttccaaaaaaaaaaaaaaaaaaaaaaag

SEQ ID NO: 1545 - DNA, 446 bp, Homo sapiens
aaaaaatacaccacacgatacaactcaatacaggagtatttcttctcaaattcttctagcaccatcaacattcttcaagtatctgaaatactattaattagcacctttgtattatgaacaaaacaaaacaaggacctcagttcatctctgtctaggtcagcacctaacaatgtggatcacactcatgggaaagtgttttgaggtagtttaaacctttggaagtttgggttttaaacttccctctgtggaagatattcaaaagccacaagtggtgcaaatgtttatggtttttatttttcaatttttattttggttttcttacaaaggttgacattttccataacaggtgtaagagtgttgaaaaaaaaattcaaatttttgggggagcgggggaaggagttaatgaaactgtattacacaatgctctgatcaatccttctttttct

SEQ ID NO: 1546 - DNA, 277 bp, Homo sapiens
  misc_feature (1)...(277): n = A,T,C or G
cctgagggganaccaccttctgatganaaccaacccctagctaccactctgtattcatcaggggaggggtataaaccccacatgcaanaagaacccttgcccccagtgtcaaatgggatggggatgctagagttatagtaaaggggaaaccctatgtaagctgttaacanagttcacaggggtagggataacccctgttctccagctcccaaatgtgctcactttcccagcttcttcatccgttcatcaatgctggcaaagttcccctcaactgtgg

SEQ ID NO: 1547 - DNA, 365 bp, Homo sapiens
  misc_feature (1)...(365): n = A,T,C or G
caacagtcgctccctggacctggacggnatcatcgctgaggtcaaggnncngtatgangagatggccaaatgncacccggcnnnaggtnnaaccctggtaccanaccaagtttgaggccctccaggcccaggctgggaagcatggggacgacctccggaatacccggaatgagatttcagagatgaaccgggccatccagaggctgcaggctgagatcgaaaacatcaagaaccagcgtgccaagttggaggccgccattgccgaggctgaggagcgtggggagctggcgctcaaggatgctcgtgccaagcaggaggagctggaagccgccctgcagcgggccaagcaggatatggcacggcag

SEQ ID NO: 1548 - DNA, 423 bp, Homo sapiens
aaaaaaaactgatattaaatgtgacacttcagagctactactggaaggagtaattcgtaacttccctaccctccttccatccctgctgattcaggagaagggggaaaaaacaaagaaaacaaaacgaaaaaccaaccagggtctcttgtagatttgctgctattccacaaaatgttggcatttgctgccatgccacaatgttggtccactgaaataggatttctgcggaaactgtcaacagtagtaattcaccatatgcaagtaccatccttatcatgcgagaataatcacaggttctgtagaaatgtacaatgtgcttaagataatgaaaattgtagcgctgcatctgagatttatttctctacttagctagtaaaacttgtcatttttgctcacttaagtatgatcatttgtgattccttt

SEQ ID NO: 1549 - DNA, 374 bp, Homo sapiens
  misc_feature (1)...(374): n = A,T,C or G
aaatagcatttatctcagttggctctatgccagttggtcttggtattggggtaagggggtattgcaggtaaaaagaggtgaagcagattctggctttcagtttcttagctcanaaattccagcaatccctgtagttctttgcatcccctcaccacctctggaatagaaancagggtcttataaatatgctgaaccatgncntctaatttttctaanctctttgcanaaccnccnanggttttcctntagganntttntntggntctggacctgnancatnagttttnccttcncatttttcatctccagnaacatcctctcagtttgcccacctcctganagagccacactttctcctgnanccaatngggggg

SEQ ID NO: 1550 - DNA, 341 bp, Homo sapiens
agaggattgagtaagtagttggatggctttcataaaaacaagaattcaagaagaggattcatgctttaagaaacatttgctatacattcctcacaaattatacctgggataaaaactatgtagcaggcagtgtgttttccttccatgtctctctgcactacctgcagtgtgtcctctgaggctgcaagtctgtcctatctgaattcccagcagaagcactaagaagctccaccctatcacctagcagataaaactatggggaaaacttaaatctgtgcatacatttctggatgcatttacttatctttaaaaaaaaaaaggaatcctatgacctgatttgg

SEQ ID NO: 1551 - DNA, 311 bp, Homo sapiens
aaatccttgaggggtacagcatcactcggattctgtgtccaatggccttagcaggaagattgcttcggaatttggcacgaaccatgccactgtttccatgggcccgagttacttttccccagatgactctggttttgtttggtttgccgccaggagtgactgtgttgttctttgctttatatacataagcgcatctcttgcccaaatagaattctgtttcatctcgggcgtaaacaccttcaattttaagaagagctgtgtgctccctttggttccggagaccccgcttatagccagcaaaaatggccttg

SEQ ID NO: 1552 - DNA, 345 bp, Homo sapiens
ctgctgccttcatattgaaggtttttgagttttgtttttggtcttaatttttctccccgttccctttttgtttcttcgttttgtttttctaccgtccttgtcataactttgtgttggagggaacctgtttcactatggcctcctttgcccaagttgaaacaggggcccatcatcatgtctgtttccagaacagtgccttggtcatcccacatccccggaccccgcctgggacccccaagctgtgtcctatgaaggggtgtggggtgaggtagtgaaaagggcggtagttggtggtggaacccagaaacggacgccggtgcttggaggggttcttaaattatattt

SEQ ID NO: 1553 - DNA, 386 bp, Homo sapiens
cactctcctgttgactatttccagagctctaggtgtttaggcagcgtgtggtgtctgagaggccatagcgccatcatgggctgatttttattaccaggtcccccagaagcaggtgggaggctctgcttcctgctgccgctctgcagcctggacctgtggaccctggttgtaaagagtaaattgtatcttaggaaaccagtgtcacctttttttcaccttttaattttatattatttgcgtcatacatttcctgtaacggaagtgttaattttactgtactttttggtaccttttgggaatctaatgtattgtaaggtattttacacgtgtcctgattttgccacaacctggatattgaagctatccaagcttttgaaataaaattt

SEQ ID NO: 1554 - DNA, 239 bp, Homo sapiens
  misc_feature (1)...(239): n = A,T,C or G
cttttctgaaaaaaaaaaaaaaaaaaaaaaaaagcttgtncaaaaaaactttttttgccatccatcctgtgcaatatgccgtgtanaatatttgtcttaaaattcaaggccacaaaaacaatgtttgggggaaaaaaaanaaaaaatcatgccagctaatcatgtcaagttcactgcctgtcanattgttgatatataccttctgtaaataactttttttganaaggaaataaaatcan

SEQ ID NO: 1555 - DNA, 358 bp, Homo sapiens
ctgggtcacatccatccctccattcatccttccatccatctttccatccattacctccatccatccttccaacatatatttattgagtacctactgtgtgccaggggctggtgggacagtggtgacatagtctctgccctcatagagttgattgtctagtgaggaagacaagcatttttaaaaaataaatttaaacttacaaactttgtttgtcacaagtggtgtttattgcaataaccgcttggtttgcaacctctttgctcaacagaacatatgttgcaagaccctcccatgggggcacttgagttttggcaaggctgacagagctctgggttgtgcacatttctttgcattccag

SEQ ID NO: 1556 - DNA, 309 bp, Homo sapiens
cctataattcctaccttgactgtgtgcatcatttgtaagctagcagatctatgtggtgaaaatgcacaggagcttggtagactgcgggggaaagagagagctcctttcgccatgttttaccagtctgctgttataacctcttaggttgtatcctttaatttccagccttttaggttagtttctgtaacagaacaagtgagtctgggatgaagtcctcaaagtacttcaaatggtaattgttttgtttttgtaatagcttaacaaataaacctaggttttccaaaaaaaaaaaaaaaaaaaaaaaaaaaa

SEQ ID NO: 1557 - DNA, 152 bp, Homo sapiens
tttaaaaattgaaaaaagtggaaaacatctttgtacatttaagtctgtattataataagcaaaaagattgtgtgtatgtatgtttaatataacatgacaggcactaggacgtctgcctttttaaggcagttccgttaagggtttttgttttt

SEQ ID NO: 1558 - DNA, 371 bp, Homo sapiens
ccatagctgtaataacaatgacaacagtaggtaacggtagtcataccaacagtagggcagtgcattttatattacaactggtttcttgctctagtaggcttggggatgggtgaagacggacagggctggcgcagaccctttccttctcctctccagcccacagtgatctgggcttttacaagacagcctgcttccattcagtagtgtgggaaagttccttcttggcttagcaatacccctgagaccttgttcagtgggctgtgtctctccctgggatgctgggagcaccaagtgtggccgagctagggctgctgacttcctctgggcgcctctgggctgcgagggtctcttacaggaattgaggccctttg

SEQ ID NO: 1559 - DNA, 418 bp, Homo sapiens
  misc_feature (1)...(418): n = A,T,C or G
aaaaaatttaactccatatgtgtnnctcttgttctaatcttgtcaaccagtgcaagtgaccgacaaaattccagttatttatttccaaaatgtttggaaacagnataatttgacaaagaaaaatgatacttctctttttttgctgttccaccaaatacaattcaaatgctttttgttttatttttttaccaattccaatttcaaaatgtctcaatggtgctataataaataaacttcaacactctttatgataacaacactgtgttatattctttgaatcctagcccatctgcagagcaatgactgtgctcaccaggtaaaagataacctttctttctgaaatagtcannatacgaaattagaaaagccctccctattttaactacctcaactggncangaaacacagattgggttct

SEQ ID NO: 1560 - DNA, 548 bp, Homo sapiens
  misc_feature (1)...(548): n = A,T,C or G
cttagagtcttttgtgccataatgcagcagtatggagggaggattttatggagaaatggggatagtcttcatgaccacaaataaataaaggaaaactaagctgcattgtgggttttgaaaaggttattatacttcttaacaattctttttttcagggacttttctagctgtatgactgttacttgaccttctttgaaaagcattcccaaaatgctctattttagatagattaacattaaccaacataattttttttagatcgagtcagcataaatttctaagtcagcctctagtcgtggttcatctctttcacctgcattttatttggtgtttgtctgaagaaaggaaagaggaaagcaaataccgaattgtactatttgtaccaaatctttgggattcattggcaaataatttcagtgnggtgtgttattaaataagaaaaaaaaaaattttgtttcctaggttgaaggtctaattgatacgtttgacttatgatgaccatttatgcactttcaaatgaatttgctttcaaaataaatgaagagcag

SEQ ID NO: 1561 - DNA, 311 bp, Homo sapiens
aaatgtcattggaaaagttttattgaaaaaaaatgtacaaataagttcttggattgatagcaacaaaggctcatgttcccccttccctccctatctttgaagaactaaaaaaggaagaaacaaaacaaaaagctcatccccacaacgccagacacgatgcttcttgaccagagtcttcccagaagcccctcctgggagctccttctcaatccgcctcactgcggccaggtcattctgggggtgcctggtcccaggggctgcagcgcctagttttatagttgggagaggttgggatagagctggggaggcag

SEQ ID NO: 1562 - DNA, 266 bp, Homo sapiens
  misc_feature (1)...(266): n = A,T,C or G
ataatggacttttctgtaagaatgtaaaactcaaaaattngccaagtatgtatctgatccacacaaatccttagaaaggttttctgtgtagnctncattaacgcaaatctttgggaatgtttcactcttactgtagagatctngaatatgcntcacaataatgaagctacaaagtttttatgcagtgcattcattgtaaactataaataacatttgtattaaaaggaaagctgggnaatacaaaaataggagagactctgaggagc

SEQ ID NO: 1563 - DNA, 78 bp, Homo sapiens
  misc_feature (1)...(78): n = A,T,C or G
caaataataaattagttaaatcagtttctgagttatgccactggctgatgaaaagttganaggtctntttgcanaatg

SEQ ID NO: 1564 - DNA, 261 bp, Homo sapiens
ctggtaaaggtgactgtacagatgtgcattttccttttggtataaatggtccacagcactaactggtaaggcttattgtacagtatattgtcagtattcttctggttcagcataccttatagttcatatataacctgtattaattgtatagattgtgcattaaaagctgttaccaagttgtcagaacataagagcgaaaacaaggtcatatgtaatattttgtttgtaagtatcctttgtatcatagcaaaggaaatgttt

SEQ ID NO: 1565 - DNA, 322 bp, Homo sapiens
ctgactccttgaatatccagtgtgacccataaaatagtctgttaataccggatcttaatttttatgttattcattaagattttaactatattcagtacgtaatttggagacaaactagcatcatcaaaactgcctgtaaatagggtgtttagtctttctataaaaacagaatagggcagttacctaccagttaaaatatcttatatgaagaaaatagaataaagatccagtcatatatgtaaataagatgtactgattgtacgtaaatgaaaaatggaccctttaaaaattatttttacctgaagcttgtcataattttttt

SEQ ID NO: 1566 - DNA, 370 bp, Homo sapiens
  misc_feature (1)...(370): n = A,T,C or G
aaagtttgctaaatcttagcacaaatgcagattcccagagctcttctgattttgaagttccctcaactccagaagctgagttacctaaacgagagcatttacaatatttatatgagaagctggcaactggtgagagtatagcagtcaaaaaaagaaaatgctcactcttagatacctaagaattcaaagcgtttcaacctagagcaaccactaaaaaacctgcacagagatggcagtcaatattacaatagagaaaatacagtacttaaaaatgttcaaataacctggttgggtgnggnggctcacacttgtaatcccagcactttgaggngggcaatggcttgagcccaggagttcgacaccagcctgg

SEQ ID NO: 1567 - DNA, 115 bp, Homo sapiens
ccaccactcacgtcccaggtgacgtttatgacatgcccgcctgtcctgttacccccttgctcagaaaccttcaggagttagccaccgcccataggacaaggttccaaggggcttt

SEQ ID NO: 1568 - DNA, 181 bp, Homo sapiens
gctgccccagggcctgggaaggaggccgctatgcagggtagcactgggaacaggagacccacctgaggctcagccctagccctcagcccacctggggagtttactacctggggaccccccttgcccatgcctccagctacaaaacaattcaattgcttttttttttggtccaaaataaaac

SEQ ID NO: 1569 - DNA, 497 bp, Homo sapiens
ctgagaaatctaggtggattcatattcgtaatcattgattaacatgcacatttgggtttgcacatttttgtttatcatacatttttctccgttttctattaaagaacatgctctaggggaactattaatagcccaccagtcgggtaggcagcattcaatccttctatgccttctttcgccacctgttgaggtctttcttctgaaacaaagaagaaatagacaaatcagacttgccctcttggaaatgtggtccagatttctctactcccaagctccaaaaaaggcatacattggatgggctagatcaactcctcctgagagccataaatccgccaagagttgttttccatgtaagggtgtggtacaatggggaacgcctgatgttggaggaaagcaggaggactttagagtggagttgcattctaatctctctgccgcttcaactatgtgacctggggcaaatgatataaactctatgagcctctttccttatcttt

SEQ ID NO: 1570 - DNA, 413 bp, Homo sapiens
ccacaccagggaccctgccagaggccgcagactggcagcagcagcctccccacacagtgggggaagagccactccatccccaaattcaagattagaaagatccctgactgcttctcaagatccagaacattccttgacagagtatattcaccatttagaagtgatccagcaaagattgggaggggtactaccagattctacttcaaagaaatcctgccacccgatgattaaacagtgaatgaaatgtcatggctctttcctgcgacaattctatttgaggaaaagatttgtttttcccttttcccaaggaagctcgtgggacagcatgggcactactcttcatgtgcggtgacaccagcccccagatgccttgaattaagtgtcctcacctttatgcatgactgcaaagccag

SEQ ID NO: 1571 - DNA, 385 bp, Homo sapiens
aaaacattgtcaggtgaggcaaatgcacaagtaatagaaagcaaagggcaaggttcactgaatcacagcagtcagaagaaagtgctttagggaaccaagagattgtttccagcctgaagaggcatgggtggcaaatcagaaaaggggattgagattaaaatagaagacttcagtctggattgttgatgacactcagtatggactatatttgtctctccttttcctttctccccatctttgggcttaatttacatgtagtgcccaggactgttcaatgcgctttttctatacttgcttgcatttttgctttaatgtcttctacagaactaggtccttttggtgttttaggagttttttcctgtttcttgaaggattcttgtccttt

SEQ ID NO: 1572 - DNA, 155 bp, Homo sapiens
atcaaagcagtggacaagaaggctgctggagctggcaaggtcaccaagtctgcccagaaagctcagaaggctaaatgaatattatccctaatacctgccaccccactcttaatcagtggtggaagaacggtctcagaactgtttgtttcaattgg

SEQ ID NO: 1573 - DNA, 527 bp, Homo sapiens; identical to SEQ ID NO: 1336

SEQ ID NO: 1574 - DNA, 427 bp, Homo sapiens
ccattttctccctgacggtcccacttctctccaatcttgtagttcacaccattgtcatggcaccatctagatgaatcacatctgaaatgaccacttccaaagcctaagcactggcacaacagtttaaagcctgattcagacattcgttcccactcatctccaacggcataatgggaaactgtgtaggggtcaaagcacgagtcatccgtaggttggttcaagccttcgttgacagagttgcccacggtaacaacctcttcccgaaccttatgcctctgctggtctttcagtgcctccactatgatgttgtaggtggcacctctggtgaggcctgtcagagtggcactggtagaagttccaggaaccctgaactgtaagggttcttcatcagtgccaacaggatgacatgaaatgatgtactcagaag

SEQ ID NO: 1575 - DNA, 520 bp, Homo sapiens
ctgtagcacaaacagatttgaaggagccgctgaaagttcttggcattactgacatgtttgattcatcaaaggcaaattttgcaaaaataacaaggtcagaaaacctccatgtttctcatatcttgcaaaaagcaaaaattgaagtcagtgaagatggaaccaaagcttcagcagcaacaactgcaattctcattgcaagatcatcgcctccctggtttatagtagacagaccttttctgtttttcatccgacataatcctacaggtgctgtgttattcatggggcagataaacaaaccctgaagagtatacaaaagaaaccatgcaaagcaacgactactttgctacgaagaaagactcctttcctgcatctttcatagttctgttaaatatttttgtacatcgcttctttttcaaaactagttcttaggaacagactcgatgcaagtgtttctgttctgggaggtattggagggaaaaaacaagcaggatggctggaacactgtctgaggaatgaatag

SEQ ID NO: 1576 - DNA, 201 bp, Homo sapiens
ttcgtgggcaaacgcagaggcgggaacaaactagccctcaagacgggaatagtagccaagaagcagaagacggaggatgaggtattaacaagtaaaggtgacgcgtgggccaagtacatggcagaagtgaaaaagtacaaagctcaccagtgcggtgacgatgataaaactcggcccctagtgaaatgacgcccctccccc

SEQ ID NO: 1577 - DNA, 313 bp, Homo sapiens
aaaatctcttcttcctcaggagtcagcttggctcccttcttgcggcccaggggcagcgcataatgggactcgtaccactgtcggtacggtgtgctgtcgatgagcacgatgcaattcttcaccagggtcttggtacgaaccagctcgttattagatgcattgtagacaacatcgatgatccttgttttacgagtacaacactctgagccccaggagaaattccccacgtccaacctcagggcacggtatttcttgttacctccccgcacacggactgtgtggatgcggcgggggccaatcttggtgttggcag

SEQ ID NO: 1578 - DNA, 151 bp, Homo sapiens; identical to SEQ ID NO: 991

SEQ ID NO: 1579 - DNA, 419 bp, Homo sapiens
aaaccaaagtttagaaagaggtttttgaaatgcctatggtttctttgaatggtaaacttgagcatcttttcactttccagtagtcagcaaagagcagtttgaattttcttgtcgcttcctatcaaaatattcagagactcgagcacagcacccagacctcatgcgcccgcggaatgctcaccacatgttggtcgaagcggccgaccactgactttgtgacttaggcggctgtgttgcctatgtagagaacacgcttcacccccactccccgtacagtgcgcacaggctttatcgagaataggaaaacctttaaaccccggtcatccggacatcccaacgcatgctcctggagctcacagccttctgtggtgtcatttctgaaacaagggcgtggatccctcaaccaagaagaatgttta

SEQ ID NO: 1580 - DNA, 221 bp, Homo sapiens
  misc_feature (1)...(221): n = A,T,C or G
naaagacaaannntnngcagtgnactgngaancttcttantgggctanntnntccaggcntgaagcacctncgtnatctttgangaacnatcccttggacactgcgctgnaannanattnaccnacnancatannnctcanatgcacnnngctcgcnnntgcntnnnggnnttggtacttaccntgtantgtgatgacaatactctgcctcnaccanntnt

SEQ ID NO: 1581 - DNA, 220 bp, Homo sapiens
  misc_feature (1)...(220): n = A,T,C or G
aaaagacaaaanntntgnanaggnctgggangctncntantggnctacataatncagccctnnngcacctnngngatctctgnnnaactttnccttggtgactgtgcttnatccacattaaccatgcttgcatattgtctcacattcaccaagcttgttcctgccttggggcctttgtacttaccatggtntgttttgagaanactntgnctnangatat

SEQ ID NO: 1582 - DNA, 391 bp, Homo sapiens
ccacagcaccagcctcttctctagaacttgctactcttaactcctttaatatcaaacttctttacccttcaaggtcccttcagcatggcccttgccctcctgtctcttctttctctgcctctcgctgtaactcactgctcacacttttacctctgcatctccacacaccaaaccttccaacaaaacaggcttctctctgcaggcaattcacatccctcacctccttcaaactctacctcgaaactcctcttttccagaaagcgctcggtctccctggttccagtccctcattacctggctcacgtaatgctctgggtatcagaggacctgggctatagtcctggtcctgccacctgttggctgttatggtcttatgtattttcttattttt

SEQ ID NO: 1583 - DNA, 372 bp, Homo sapiens
  misc_feature (1)...(372): n = A,T,C or G
ccagtgaaaggaaacaaaactggcagtttgtccatttgaatatcagacctagtttcttcttaatttccacactatttctcccatattccttaaacttcttggcatccttcatgccttacagctacccagatgcaataaagtcattgtacagtatttcttacaatataagttatatgcaatgttcagcattttttttttttcacagcactanagaccctgttaaataggggatatgagtcagaatggcttattcacagatggggtccanattcagtggttggaacacagacaccacagtgagctcctttgcaaagtggcaaacataattttgctttctgccttcaaaaacatatatccatcgcgtttaggntt

SEQ ID NO: 1584 - DNA, 221 bp, Homo sapiens
ctgctgcttcagcgaagggtttctggcataaccaatgataaggctgccaaagactgttccaataccagcaccagaaccagccactcctactgttgcagcacctgcaccaataaatttggcagcagtatcaatgtctctgctgattgcactggtctgaaactccctttggattagctgagacacaccattctgggccccattaaataccgtagagccctctc

SEQ ID NO: 1585 - DNA, 375 bp, Homo sapiens
ctgatttttatttttcttcttgattctcttctacagtttccaaattctctacaatgaacatgtacttctttttaatatcaaaagacaaaagaattggtacgtaaaaagaacatccttcccatcttcaaggtcaagattgaacgctgactcctgcaggaagtcttccaggattcccaggcaggaatgatggctccctgtccctgtagctccaggagttcttgcttcacgcacgccccacataccagactgaatgttggcaggaggagtgaccaggtcggtcatctgtgtccctaccacctacaacaggccagcaatctacccgtgtgtgtttgttggacagaattaaccatgatgggcggccgagggcgcctggag

SEQ ID NO: 1586 - DNA, 267 bp, Homo sapiens
  misc_feature (1)...(267): n = A,T,C or G
aaaaaaatccccactgtcatgaacataaatngaggttttcagcccgggtataanctgaatcaaaaaaaggaaataaaaaatccaatagngtattaaacatttttcactcatttgccntactgacagngcaaatacaaatntggactaaatgtncanactctcaancaacaatgtncagntttcttcgtcctccatgctaaaanatgtaaaagcttaagggtcnaacaataccaatngtataggcttcaaaaaccatctaagttaggg

SEQ ID NO: 1587 - DNA, 299 bp, Homo sapiens
  misc_feature (1)...(299): n = A,T,C or G
aaaattcatggaagtaataaacagtagntaaaatatggatactatgaaaactgacncacagaaaaacataaccataaaatattgttccaggatacagatattaattaagagtgacttcgttagcaacacgtagacattcatacatatccggtggaagactggtttctgagatgcgattgccatccaaacgcaaatgcttgatcttggagtaggataatggccccaggatcttgcngaagctctttatgtcaaacttctcaagttgattgacctccaggtaatagttntcaaggttttca

SEQ ID NO: 1588 - DNA, 329 bp, Homo sapiens
gatgacttcatttctcaggacagaatgacacaaacacaagaagcagtctctagggctggctgagaccacatttatctgttctcctaaaagcactagctcagctcccaaaagaagaattacaaatctgagaagttagaggaaaggtacagaataggaattctgattaacaagaaaaatcaattaatgacattggtactctattcttcatatcagtaataatacaaactcagcccttttaaatcagagaatctgccattctatatctaataaagtagctttacaacccctaaagtaaaagaattacatgaaggtgtaaaccaatttgcctc

SEQ ID NO: 1589 - DNA, 303 bp, Homo sapiens
aaaaaatttgatttagcattcatattttccatcttattcccaattaaaagtatgcagattatttgcccaaagttgtcctcttcttcagattcagcatttgttctttgccagtctcattttcatcttcttccatggttccacagaagctttgtttcttgggcaagcagaaaaattaaattgtacctattttgtatatgtgagatgtttaaataaattgtgaaaaaaatgaaataaagcatgtttggttttccaaaaaaaaaaaaaaaaataaaaaaaaaaaaaaaaaaaaaaaaaagcttgtac

SEQ ID NO: 1590 - DNA, 130 bp, Homo sapiens
  misc_feature (1)...(130): n = A,T,C or G
atatttttttcctttgcattcatctntcaaacttagtttttatctttgaccaaccgaacatgaccaaaaaccaaaagtgcattcaaccttaccaaaaaaaaaaaaaaaaagaataaataaataacttttt

SEQ ID NO: 1591 - DNA, 123 bp, Homo sapiens
  misc_feature (1)...(123): n = A,T,C or G
cctaaagagctanagaagcaagtangggccagggccanagtcggcttcaatggaacaacancccagtgccctaaggcccctaactcttgctggctgnttcttgaccccaagccagggttggga

SEQ ID NO: 1592 - DNA, 614 bp, Homo sapiens
  misc_feature (1)...(614): n = A,T,C or G
ctgaagaaacaggtataaatttggcagccagtaattttgacagggaagttacagcttgcatgactttaaatatgtaaatttgaaaatactgaatttcgagtaatcattgtgctttgtgttgatctgaaaaatataacactggctgtcgaagaagcatgttcaaaaatatttaattcacttcaaaatgtcatacaaattatggtggtttctatgcacccctaaagcttcagtcatttagctcaggtacatactaaagtaatatattaattcttccagtacagtggtgtttcataccattgacatttgcataccctagaataatttagaaagacatgtgtaatattcacaatgttcagaaaagcaagcaaaaggtcaaggaacctgcttggttcttctgagatggtctcatatcagcttcataaacattcattctacaaaatagtaagctaacatttgaacacaatttccaagataaagcatattttctcataaataatgaagtctttttctcangcacctcagaagtatacaaaagaatttgagtttgaacagatctcttggaatgtgtttaacctggtatttcaacagacttaagatttccagggnttcacaag

SEQ ID NO: 1593 - DNA, 460 bp, Homo sapiens
aaaatgtccagaataagcaaatctccatatagaggaagtagattagtggttgcttcgggatgggaggaatgggaagattgaggtctttcttttgcagtgataaaaatgtcctaaaattgactgtagcgatggccacacaactctgaatatgcttaagaccattgaattacacactttacgttggtgaattgtatggtatgtaaattatagttcaataacatagttacaaaagataatcaaaagcatgaaagcactattgatgtggtttggatctgtgtcctcaccgagtctcatgttgaaatgtaagccccctggtgggaggcgatgggattatggggcagagtcctcacaaacggtttagcaccacccgctcagtgctgttctcctgatattgagtcctcatcacatctggttgcttcaaagtgtgtggtgcctcccctctgtctccctcctgctctgg

SEQ ID NO: 1594 - DNA, 226 bp, Homo sapiens
tgacaatcctggaaatctgttctccagaatccaggccaaaaagttcacagtcaaatggggaggggtattcttcatgcaggagaccccaggccctggaggctgcaacatacctcaatcctgtcccaggccggatcctcctgaagcccttttcgcagcactgctatcctccaaagccattgtaaatgtgtgtacagtgtgtataaaccttcttcttcttttttttttt

SEQ ID NO: 1595 - DNA, 204 bp, Homo sapiens
gttctggaagcaaaaggcccaaggtggagtattcagaagaggagctgaagacccacatcagcaagggtacgctgggcaagttcactgtgcccatgctgaaagaggcctgccgggcttacgggctgaagagtggtctgaagaagcaggagctgctggaagccctcaccaagcacttccaggactgaccagaggccgcgcgtccag

SEQ ID NO: 1596 - DNA, 483 bp, Homo sapiens
  misc_feature (1)...(483): n = A,T,C or G
aaagacatgccaatttgaatnggcatcaaagtaaaaaaataaaagcaaatgctaaaanntnctttacaataaaaaaattaaataattggcaggttaaatgaatgtaaaatgaggaatgtacagtgaaaaacaaactaatataaagcattccagttgataaaaacctcctcaggcttatggtttgttttccaaggaaattatgtttcaatgtaaagtttgaaatactccagacatacattccatgtaggttttgggtgccaatgttaaaatttcaaattttgcatgcaaggcttagcaaagaaacactggcagaattccagcatttgcaaaattctaagttttggtgaatattgtaaatattacaattggtattagaaagccatgatgaatccagaattaagagaaaacccatttcataaatattttgtttgattaaaaaataccaggcttaccatgttctaaataattcaagaaaacatcttt

SEQ ID NO: 1597 - DNA, 165 bp, Homo sapiens
  misc_feature (1)...(165): n = A,T,C or G
aaatgaagaaaccatgcctttaggggcccgtgaacacagaaccctcaagacaaggntgntttatctggaggacacatctagctgccattgcaacctcactgggctccccagactctgtgtgtgagaaattaaaccccctgcttgcttgaaaaaaaaaaaaaaaaa

SEQ ID NO: 1598 - DNA, 472 bp, Homo sapiens
  misc_feature (1)...(472): n = A,T,C or G
ctgcaccattttcaggatcatnttgatatcctgcatgggcattgcaaaaatcttcagcttcttacagcacaggcgtagtacatttttctttcgcttcactttctcaatgaggtaggagaacaattcatcacaggcaccttccttgaggaacaggtctacgagcacctctactggaatgaagggctgctctgcctctgtgctcaaaccatctacttttcgcttctttgtcatgggctgagctgcttctggctctggaaatgagtacagactggccctgtttccagaccatacagtccagaagtcctgatgagagttcttccgtaaatccagcacttgaagtttccacctcctggggcgaacctcctgggcaaggagcacatcaagtccatcaagcacagctttgaaggtctccaggtgaagatgttgtcccttcatcacgcactcccagagggaggcaggtgaanggccagng

SEQ ID NO: 1599 - DNA, 193 bp, Homo sapiens
  misc_feature (1)...(193): n = A,T,C or G
ccagggctggtgttgggccttnagcagcatcttccggtgctatcctcccctccnaccnttnacagctaaagccaagtccagcggccgcagtcttcacctctccacactcactttttatctggtgtttttacttctgcctgcgtttgctctctagccaataaaccgtccttgtgtgcgagncaaaaaaaaaaaa

SEQ ID NO: 1600 - DNA, 370 bp, Homo sapiens
ccacgcaggtcagtggtaatcaaaactctgctagagccagaacgaaactccctcataatcacgtctcgttccttttggtccatatctccatgcatggcggatacagtgaaatctcgagcatgcatcttctcggtgagccagtccaccttcctccgggtgttgatgaagatgactgcctgggtgatggtcagggtttcatacaagtcacatagtgtgtccagcttccactcctctcgttccacgttgatgtagaactggcggataccctccagggtcaactcttccttcttgacaagaatccgaatggggtccctcatgaacttcttggtcacctcaagcacatcagaaggcattgtggctgacagcaaaa

SEQ ID NO: 1601 - DNA, 548 bp, Homo sapiens
aaaaaaccttcaatcaacaatatataaataacttaatctgaggtaagagggaaaaatgccctgcaaacactttagaaaaacacatctctgccacactacagaaatagacctttaccacatcttctgaatccccagttccctccatctaccaaagattttgggcaccagaactaaagatgagaatctctcccacccctaccacttccaggtaaacacaaagttcatgttcagccaggctaaagtacaagaaaactgaacccactctccatcccaccccatcctaggataggtggggccagggcagaaatcatggaatgctcaggactccacccctcccaagtgcactgaggtaagttctggaactgagcttcctcccaacgagccactcacctcctctgggagttcattcacctcctctcccttcctcaaaggacaatgtttaatctctgaaattcctcttgccttgtcagcagccaccatctggctgccactccaaccagtcctcaaaagaactcagcctccaaccctgaccccaaatctgtccaacc

SEQ ID NO: 1602 - DNA, 402 bp, Homo sapiens
  misc_feature (1)...(402): n = A,T,C or G
ctggagacccaagttcccttctnattgctcagggtttaggtgtgtcatctgcctcaccccactcccccatacatcatgccctgtgacttgatgcttcatcttgcatggttcatgactggcgccatgggcactggaaaggtgtggtttccaagaccccttcctaccctccatccagtagctgtcaaagggaaacttggtgaggtcagctctctcactcanaagggagacagggaaaaaggcagaaaggaagggagctgttaggatacccaacagaatcccatctggccttggtgcccctaaaggctgtaaaacttggtacttttgngttcccagangctatttatccaaggtggctagtaaattgccttactgatccaatgggttccccccaccccaccttgg

SEQ ID NO: 1603 - DNA, 485 bp, Homo sapiens
  misc_feature (1)...(485): n = A,T,C or G
aaatgttgaactgagctaangatgcactttcttgtggacatagaaggggcccacgtaaggccctgagtaggctccttagttgctgctttacctgatgagggccaaagagattaactctgcctcgttgccatgtctcagaaaagttgccatatttcacccagaaggggctcgtttttctcttactcttactttaaccatgtgcctggaggagccattctgggctcttgcacttgcccagcctttctttgccaggggcagagaagggaaagggggtagattgagtgtgccaagggccgtgcaagggcaggcttgctttccacccatctgctgagggagccctctcccctcgctccttgcctctgttcacacctgttgtcttggaagaggatggtccctttgtcttaaggctttgtgataaagtcatctccagttaggatctgcacctgtttccttcgtaatagtgcctggcggcctttctgaagtta

SEQ ID NO: 1604 - DNA, 424 bp, Homo sapiens
ccaatcagtttgcaatttataaacctgtcactgattttttccttcaacttgtggatgcaggcaaggtggatgatgccagagctctcctacagagatgtggtgcaattgctgaacaaaccccgattttgttgttgttcctccttaggaattctaggaaacaaggaaaggcatcaactgtgaaatctgtgttagaattgattcctgaattaaatgaaaaggaagaagcatacaattccctcatgaaaagctatgtctcagagaaagatgtcacatctgctaaagcactgtatgaacatttgactgcaaagaatacaaaattggatgatctgtttctaaagcgttacgcatctttgctgaagtatgctggagagcctgtccctttcattgaaccccctgaaagctttgaattttatgcacagcagct

SEQ ID NO: 1605 - DNA, 527 bp, Homo sapiens
  misc_feature (1)...(527): n = A,T,C or G
aaaaggctagaacatcctttgacttcttgaaaatctgcatgtctggcttgggttttattaccacatgcctgagttcttcaagaatggaaggctcaagtattctcatcttccatttgccaaacttccttcctgatttgagtcacgtgttccacttggaaagaaagggaacagagagcctcctccatggacagtgtatgaatttcattgggaatcttgctctctcccgcctctatgcctttctctctttttaaccttactttacataatattatagatgggccaagaaaagaaaagatgacataacattttgatgaattacacctattccattcttcacgtttcagaattggtcgactttgttagaagataattgaagtagccttgggtcaaaagcaaccttttcaattgtgatcatacctaaaacatataaaaaccctgccgtagattaaaagcaattataaaatcataaaattgnatgtttgcagaatcctggagcagtagatttctttgtctttggcctgcggact

SEQ ID NO: 1606 - DNA, 536 bp, Homo sapiens
cctgtctccaaggtcccttagagcaacccatacaaccaacaggctgcgtacactaccaaggaagctgctgtgtgcagccatcgcacactgggtccccatgaggaaaggaactcagtcggcttaattggctgcggagcatcccaagaaccactgaaaaggcgccactgggctcctctgccagcttcagctacctgctggcaagatggttgtcattcagctaaaagcaagaagagctactcccatcaccagtgtttcccctaacctgtggggaagagcttgctaagacttactcatgctttgtttgtatctgcaggaaggggtcctgagtgaccactgaaagtcacttgccagcctggcttttctagtagccatagtggctgagtcactggggccacctctatgctctgataaaataatgcaagcctaataatgtagagactccaactgccttaaaaggcccagaccaagctcacctgtcagccccagcacaggacaacatcttgttgatgcggatgacgtggaaggggtggagccgc

SEQ ID NO: 1607 - DNA, 124 bp, Homo sapiens
tacgtgatagatgttacgctgccttgttgaaaatttcactgactttgattttattacttttttaatgatagttatcaaacttgtatttaagctgcttgtcatttatggaatattgaacttattt

SEQ ID NO: 1608 - DNA, 327 bp, Homo sapiens
aaaaccaaaaaaaaaaaagagagagagattaaaaacagtgcattacaaaaacaaaaatcaaacttccttaagtggcacttctgaaagttgaactgacactaccagaagaaatttaggccagttaagacagggatgttcttactcaattggtcattaaaaacatccacttgtttgtaatacgtatttataattactttttgatgattgaaaaatagaacaaggttttactaggtttacttatgacaatgactagacaaccagagatccaactggcttagccctacttatccaaaagtacatttccaataagaatatacttcaatgatt

SEQ ID NO: 1609 - DNA, 208 bp, Homo sapiens
  misc_feature (1)...(208): n = A,T,C or G
aaaggctttctttgagctcatttgtaggcttatctacctactgagtaaagtagttgggtgtcctaattttattaataggattaatttttattataaatcattagagatgttttgatactttagttaaaactgctttttagtaaatttgtttttctttgcagatatgagggaaggcaccattggagatatggctatcctgngtataaca

SEQ ID NO: 1610 - DNA, 425 bp, Homo sapiens
  misc_feature (1)...(425): n = A,T,C or G
aaaatcaatggtgatgttcttttttaagcaacattcttctcttccctaatagctacaagtatnatacagtacgcaacagctcacttgaaagtgctagaatcagaggataaagaagccataagccaccccacttacatttcctactatacaatgcctttttggcgcttgataaatcaagcattcatgtagcattacattcaacagaaacatttctcgtactttgggtttaagatccttgtccctccagttcggatgtcgtgacatctgactcttcatcattgtaaatattttcagccatttgccatatctgcatgatgttatcctcagacactgagcaaatgacccaaggctcattggggntccagctaaaatctgaaatcttagcagtgtgtcctccatgaataaacaggagttctggaggccca

SEQ ID NO: 1611 - DNA, 332 bp, Homo sapiens
  misc_feature (1)...(332): n = A,T,C or G
ctgggggcactgaatctactantaacacaagcaattcactctgggaattctgtcaaatatggtggtatctgttaaaagcttggaagtagaaaagggccagttcatcttgatcatacaaattagggaatgcacccacaactgcaataccctcaggcagtatgccaacattgaaatagaaagcatctctaaaaagcactgttcctccatgggtgaagactggtattaggaagtgcacacacaatttttgggtatttgttgcaacaggaacacgtggatttatgacactcaaacctagacactgcaaagttaactggtaagattttttttttttt

SEQ ID NO: 1612 - DNA, 546 bp, Homo sapiens
aaacaacaagacgcttgacttgaagggaaaactatctaggattcttttttgttttagagtaatttatccctacttaaagacagattgccctacatgtaacagctacgtacaaaaaagttataaaattgtccttggttttacaatgataaatgaaaaacattaaaattctccaattgaacaaggtatgcaaggatttttatgttgttgttttttttttttgttaaaacagtgagagcaaaataacttactggaatataaagataagagctgaatgagcatgccactaatggagaaagggggtattttcacagaatcagtatttttccccatcccgtctccacttgatgtcaatcaaaacataccattggctgtttagttaaaaaaaaaaaaaatgcaatatgcttgtgcacatataccagttactttatgtacaataaaggaatggggaagggggaaatgaaagaatagagaaaactatacggtagtagtcaggatgtggtggaaccaaattgcagttttctaattgagaatgtaatcttggtcttt

SEQ ID NO: 1613 - DNA, 546 bp, Homo sapiens
cctacttgtttgcagcttccacacactgcacctacctactacctctcttccatgcttaactgggtttagaaaggtgagctatgcgtagaagaactacttgggatattcaagtgctgtatttgaacgataagcctatagataacagtctgaagctgcaagggagactttgttagtacactactataaacaggtaaactacctgtttgtacttgatatagtgcatatgaaatgactgatttaatacaaaactacagaacatgcaaaattttttctgagatgttaagtattacttcagtggagaacaaaacttacttaacctttcgctaatgcatgtagtaccagaaagcaaacatggttttagcttcctttactcaaaatatgaacattaagtgttgtgaatttgtctgccaagtggttcagaaatacattataaataacctagttaaaaaaagaaactgtgaaccatcttggtcagtctattctattctatgtttatatgttattttctcaagcaatcgcttcataattatagggtttacaaaaagg

SEQ ID NO: 1614 - DNA, 314 bp, Homo sapiens
  misc_feature (1)...(314): n = A,T,C or G
ctgatgcggtggtgcgtgtgatttgtcaaaagaaagccttctggatgctgttaagatgtncccttcaggtgaacctggtatcagacccacagtacttgctgtttgagaaaaaataaaaacaaaaaggtcacctgttctccagcccttttctcttacctggtatttccttcctttctcctcccccaccccaaataaaaaaacaaaaaacactagaatttatttatatgtattgatgttgtaggtctaggtgaaaaaaaaagaagtaaatgtttcactgctctatttatgaaaaaaaaaaaaaaaaaaaaaaaaag

SEQ ID NO: 1615 - DNA, 319 bp, Homo sapiens
  misc_feature (1)...(319): n = A,T,C or G
aaatatcacaagtaggtcttnagtgtcatctggcatcttctttctgtagccaggggatttttanatcttattcatcagcctgctgaacagttcctttttcagagacatagataccatccaaaaatttcctgatatccttgtttttaactgttgtggcttgctgaatcaaagccgctgaatttgaaacaagctcaatgtcattnccttcaaggattaatncatctttctgggcttgagatactgaacaagcaacacctggtctcatcctaaccctgcggatatatttttcncccaaganatcgccggattncnacaagag

SEQ ID NO: 1616 - DNA, 408 bp, Homo sapiens
ctgattaaaacatgtgtgagctgaaggcaggcgatctgtggacctgtcatctcgatggatctgaaacttctgaatgccattcatgccttcgagggcagcaaagccttgcaggggtaccttggaagtacccgtgacaaactggaggaacttggcacggtcagcttgatcgaaagaacgcaatgctctccagaaccactggatctgaatagagttggactggtacttgtggtattcagtgttggatttcagatcatcgatgtcaatggtgggcagtcctgatataagcagctctaactcctgctcagtgaagatggaaatgaggcgctttggaatgatctcatagaagccttctaagaaagccgccaactgcttgcggatggctcctgtcattctcatctggcataccag

SEQ ID NO: 1617 - DNA, 378 bp, Homo sapiens
  misc_feature (1)...(378): n = A,T,C or G
aaatatcacaagtaggtcttaagtgtcatctggcatcttctttctgtagccagggnactnttanatcttattcatcagcctgctgaacagttcctttttcagagacatagataccatccaaaaatttcctgatatccttgtttttaactgttgtggcttgctgaatcaaagccgctgaatttgaaacaagctcaatgtcatttccttcaaggattaattcatctttctgggcttgagatactgaacaagcaacacctggtctcatccgaaccctgcggatgtatttttcacccangaaatttcggatttcaacaagagacccattctcctggataacaacgttngatggggaagngagcatacacagacctcatcttg

SEQ ID NO: 1618 - DNA, 334 bp, Homo sapiens
aaaatgttacacaaatttctttatgataggacttctcagagcttttagcattctaatgcagagtggaaatgtgaatggcaggattcagtataatcagcacgtcccaactctatctgaacacagaactcttgttctgcatatcatcgatttgcacaccctggaacaacgtttggtagaaatcaacttgggaaatgttgcacagcatgagtgatgaatacagctaagttaggatcaaagtacaggcgtatctcgttttactgcacttcactttactgagcttcatagatattgtgcttttacaaattgcacgtctgtagcaatcctacattgaaca

SEQ ID NO: 1619 - DNA, 394 bp, Homo sapiens
aaatacatataagttattttacatttcttccatatgaaaccaatttattctgctgagtgatttcacagataaaggtgttacttacttgacttcaccatgacaagaaaaggacaagtttttttaagcagcatctttatgaattttttatcagtggcagatattttaatgggctgcatttttacaaattcctgatatattctggagacctgtggtacatttttgctactctggagatataaattaaattagcatgatgtattgccaaggaccaccacgtggattgtctacattgtgatccatgaggcactgagaggactcggccctcagatacaactcccctgggtagatgcccaggcagaacccagcaaatgtatatgcatctctgggctctgag

SEQ ID NO: 1620 - DNA, 490 bp, Homo sapiens
  misc_feature (1)...(490): n = A,T,C or G
ccatccacgatgtcctctgacngtgtgaggatgtactggcccttgtagtagttgatgagattgaggtactgcagagtggagatgacatcctccttcttgatgctggtgatttcactaatctcattgatggtgatctgtggcctctccccgctctccgacttcagccccatcaggatctccaggatggtctgggaccagtagcttcgataggataggaggccaaggtctgagaggggcttctcaggggtccctgttttcccttccactttggagagttcatagctgaactcgatcagcagcttgccgtagccccggcgctggtagggaggcagggttaggatgcaggccacattgtagtcttccgttgattctttctccttggagaagtagcccacgatgtggaagcccttacagtcatactctgtcatgacgnagaagaggaaagggtctgtgtcatagtacagtgtcttatggtcnangaaacacttgg

SEQ ID NO: 1621 - DNA, 243 bp, Homo sapiens
cgcatatgcactcaaaatgctctttgtaaaggaaagccacaacatgtccaagggacctgaggcgacttggaggctgagcaaagtgcagtttgtctacgactcctcggagaaaacccacttcaaagacgcagtcagtgctgggaagcacacagccaactcgcaccacctctctgccttggtcacccccgctgggaagtcctatgagtgtcaagctcaacaaaccatttcactggcctctagtga

SEQ ID NO: 1622 - DNA, 484 bp, Homo sapiens
  misc_feature (1)...(484): n = A,T,C or G
aaaaatgtaacaaacatcttnatatctgacaataaaatctgaaatgctgtaactngggnnattaactgcaccatccaaattcttgtgacttacgcatttttgcccaatttaacctttctgatgttcccctgcccccagacaccataaatgcattgtaattttgaaaatatctgccaactacacactgaaaattttaacctgatcaattgacataatataaaatctgtcccaaagcactgaaacaagaaaatctataccatcatgctacagacgtacttagaaaacttaaaaggaagagtaaatatcagctcagtgatttataatgaagctaataaaattcaggccagtattcttaagtgtaatgaacattatttgaacattcaacacatgaaaggtnaacaaaggctatgaacttggtgtaacttaaaacgtttcagatgtngggagtctaccagatgtaattggattcangtggatcccgtcg

SEQ ID NO: 1623 - DNA, 278 bp, Homo sapiens
ccagttgcatttcccctgcaggcttgagcccaagccagagccttgaaaaggtattcaggttgttgcccaaaacactgaaaaaaactggccctggccctgaaccaaataccttgaaccctcgtaaactccataccctgacccccttgttttggatatacccaggtagaacaactctctctcactgtctgttgtgaggatacgctgtagcccactcattaagtacattctcctaataaatgctttggactgatcaccctgaaaaaaaaaaaaaaaaaaaa

SEQ ID NO: 1624 - DNA, 229 bp, Homo sapiens
  misc_feature (1)...(229): n = A,T,C or G
aaaatgntcatgtagaaaattaatgaactataggaatagctctaggagaacaaatgtgctttctgtaaaaaggcagaccagggatgtaatgtttttaatgtttcagaagcctaactttttacacagtggttacatttcacatttcactaatgttgatatttggntgatggttgagcagttgctgaaatacacatttagtgtatggaaatacaagacagctaaagggctg

SEQ ID NO: 1625 - DNA, 400 bp, Homo sapiens
  misc_feature (1)...(400): n = A,T,C or G
ctgaaacgttaactcagagggtcttttggagcaagtagttttcagaaagcgtctgctctttnngacggtaaggatcctctacaagggcacgtgcagatccaggcgctggagcgtcaggcatgggcaccattttcatgcttcaactcaaactccaggtggtagtgagctcaacggtccctcattccacaaaacatgacagcaaattcatcttctaaaaaaagttttgttttgtttttacccattcaacaggaaaaaaaattagacacacacgatgaaatttacaaccagcagcatcatccatcacactgtctgtactaccagatcctacacttaaagctcagcattattggtataaaaacttaagacngcattagaattcttaagaaaaggtgtaaaattt

SEQ ID NO: 1626 - DNA, 360 bp, Homo sapiens
  misc_feature (1)...(360): n = A,T,C or G
gccgctctggaccgtctcaaggtgtttgacggcatcccaccgccctacgacaagaaaaagcggatggtggttcctgctgccctcaaggtcgtgcgtntgaagcctacaagaaagtttgcctatctggggcgcctggctcacgaggttggctggaantaccaggcagtgacagccaccctggangagaagaggaaagagaaagccaagatccactaccggaagaagaaacagctcatgaggctacggaaacaggccgagaagaacgtggataanaaatattgacaactacacngaggtcctcannacccacngactcctggtctgagcccaataaagactgntnattccctnagaaaaaaa

SEQ ID NO: 1627 - DNA, 584 bp, Homo sapiens
  misc_feature (1)...(584): n = A,T,C or G
cttgaagtccagtgtttccacggctggatacctgtgtgtctccataaaagtcctgtcaccaaggacgttaaaggcattttattccagcgtcttctagagagcttagtgtatacagatgagggtgtccgctgctgctttccttcggaatccagtgcttccacagagattagcctgtagcttatatttgacattcttcactgtctgttgtttacctaccgtagctttttaccgttcacttccccttccaactatgtccagatgtgcaggctcctcctctctggactttctccaaaggcactgaccctcggnctctactttgtcccctcacctccaccccctcctgtcaccggccttgtgacattcactcagagaagaccacaccaaggaggcggccgctggcccaggagagaacacggggaggtttgtttgtgtgaaaggaaagtagtccaggctgtccctgaaactgagtctgtggacactgtggaaagctttgaacaattgtgttttcgtcacaggagtctttgtaatgcttgtacagttgatgtcgatgctcactgcttctgctttttctttctttttatttt

SEQ ID NO: 1628 - DNA, 163 bp, Homo sapiens
gcctggacgtacaataccactttcgctgtcacggtaaagtccgccatcagaagactgaaggagttgaaagaccagtagacgctcctctactctttgagacatcactggcctataataaatgggttaatttatgtaacaaaaaaaaaaaaaaaaaaaaaaaaaa

SEQ ID NO: 1629 - DNA, 390 bp, Homo sapiens
  misc_feature (1)...(390): n = A,T,C or G
aaaccttatcctaggaggacnntttcacattgcgtctaacctcttcctggcctcttaatnttgggttgttaaatcttatttgctttatttccttggttcctctaagttgtaatctcggagttaaaaacagctttagaaccccgcccccccaaaaaaaaaaaaaaaaacttttgagaatttttttcaaataaatgtccattgcatagaatgggtctgtgactggctgcttctacatctgcacccaacatctggcccccttcagaactctgagtggacaggatcaggatttgactcaggaggattagaatgtgaagaatccgtgtttgagggattcagttctccaactgcctcaaagggtctcaagtttgcataagtcacctcctgggccag

SEQ ID NO: 1630 - DNA, 496 bp, Homo sapiens
  misc_feature (1)...(496): n = A,T,C or G
ccacatggttgatgatgggtgcaaagttggtagggccatagaggcgaacttggggcagggnttggcggtaggcatccacaatgccctggatgcctgcacagtaggggttactggggttgaaattcaaggcaaattcatgcgagacctgccagtcagggggaacctgggccccaaatccaaatgcagggaacagcttgtctgagtcatagtcctgaaccacgctgcccacactccacagtgccatcaggtactcattgacccctgttggactcaggtagtgtagggagtcaggtgaggaggggtctccattggagccagtgaagtccacgcccacagtgaagttgatctgacagcctcccatcacatagtccagaaaggagtactctgtttctacccgacaaatcttgacacggatagtnccagagttcttgtagcttttctttttctgctgcttctcagggtggatgcattcaaactcagccgggactgcctgcag

SEQ ID NO: 1631 - DNA, 310 bp, Homo sapiens
taaccgaaccctggctacctacagctacaaagaagctttgaagcttgatgtctactgttttgaagcgttcgatcttttaacatcacatcacatgctgacagcacaagaagaaaaagaacttcttgaatcactaccccttagcaagctgtgtaatgaagaacaggaattgctgcgttttctatttgagaacaaattgaaaaaatataataagcctagtgaaacggtcatccctgaatctgtagatggcttgcaagagaatctggatgtggtagtgtctttagctgagagacattattataactgtgatttt

SEQ ID NO: 1632 - DNA, 446 bp, Homo sapiens
  misc_feature (1)...(446): n = A,T,C or G
ccaggagctaagcttgagtntcctttactgaatttcgttcttagtgcaggttacttgtagattctagtcttcacaggctccctggggctcttaactagtcacactgggagtcatgaatgtctttccaataattcagggaattctagagatcctcaaactgtaaggtctattcatactcaacacaaggaaaaaacctcattaaaattaatgactaatcaggaagcaacgtaaccaaaagcacagtgaatgaaagttttcatggtaggttcaacatgggtttattgctagaaagatccaggggatagctttaggtttaacttcggctcaccaacgtaactttctaatcatttatttcaagtaatagctagaagtgggtctgaatgttttcccagagtctgatacgtgtttttttttgccagaagagaggtcttcaggagacttcattt

SEQ ID NO: 1633 - DNA, 300 bp, Homo sapiens
  misc_feature (1)...(300): n = A,T,C or G
aaattaaaagtgccctacctttacctaaatggctagcagacatggagaacaccacagtnntgaatccacagagctttctccatgtagctataacaatgtgttgtcgaatggcacactgtcaaacactggaaaggggcgccacaatggacctctctcttttataggaacgaatgctagattcaactatctcaactaagcaggaagtgggttcttctgctaggaatgccaaccctaattcactttgtcttgaaatatatacagattgtntgtagtagctacggcaatgatattttccttggg

SEQ ID NO: 1634 - DNA, 307 bp, Homo sapiens
  misc_feature (1)...(307): n = A,T,C or G
acgggacccgctatggggcctccctccggaaaatggtgaagaaaattgaaatcagccagcacgccaagtacacttgctctttctgtggcaaaaccaagatgaagagacgagctgtggggatctggcactgtggttcctgcatgaagacagtggctggcggtgcctggacgtacaataccacttccgctgtcacggtaaagtccgccatcagaagactgaaggagttgaaagaccagtagacgctcctctactctttgagacatcactggcctataataaatgggttaatttatgtanaaanaaaaaa

SEQ ID NO: 1635 - DNA, 404 bp, Homo sapiens
  misc_feature (1)...(404): n = A,T,C or G
cctgctcgctgggcagacntaccatgtggctgtggtctgctacctgaggtctcaggtnagagccacctaccatggaagtttcagtacaaagaaatctcagcccccacctccacagccagcaaggtcagcttctagttcaaccatcaatctaatggtgagcacagaaccattggctctcactgaaacagatatatgcaagttgccgaaagacgaaggaacttgcagggatttcatattaaaatggtactatgatccaaacaccaaaagctgtgcaagattctggtatggaggttgtggtggaaacgaaaacaaatttggatcacanaaagaatgtgaaaaggtttgcgctcctgtgctcgccaaacccggagtcatcagtgtgatgggaacctaagcgtgggtgg

SEQ ID NO: 1636 - DNA, 531 bp, Homo sapiens
  misc_feature (1)...(531): n = A,T,C or G
ngatgatncgccaagcttggtaccgagctcggatccactagtaacggccgccagtgtgctggaattcgcccttagcgtggtcgcggccgaggtccattccagaggactctttagtcatatgcagcaacatgacattttagataccctgtgtaggaccattgaatctacaatccatgtcgtcacaaggatatctggcaaaggaaaccaagctgcttcttgacattaggtgtagcatgtctacttttaagtccctcacccccaacccccatgctgtttgtataagttttgcttatttgtttttgtgcttcagtttgtccagtgctctctgcttgaatggcaagatagatttataggcttaattcttggtcaggcagaactccagatgaaaaaaacttgcatcttcagtatacttcctaaagggcaatcagataatggatatgttttatgtaattaagagttcactttagtggctttcatttaatatggctgtctgggaagaacagggttgcctagccctgtacaatgtaattt

SEQ ID NO: 1637 - DNA, 610 bp, Homo sapiens
ccttgcacaaagatggtgttgttgtctgaattatcctgttcggagtcatgacgtgatccttggtcccgagggcctttagtgacatggaaaaaaagaacaaaaaaaaaacaaaaacaaggaaaagatgagccgttagtcaacaggaaaaaacggacaaggaaaaaaattaacaccaaatccaaacttgtaaaatatcaagtaagtgctcacagcctcactccaaaccctttcctgggtcgcctgcccagaggagaaaattctaggcaggccccttaagatctgtaacttgagtctccacagagacaactccacacttcagaaaatgctgcctcccccagctcaggctgggaaatgtcctcagcacaggtggcaggggaaacggagacccattaaagtgaacaaaccaactcagcttggcccggttctctcacccgagagaagagagatgggctcgccaccagccatgcgatgtgcatccatccagtttctcccaactttaccaccagacacttaacccttgtggaacaatttttaatttctctttagaaaccatccttaaaaccgtgttgtttccccgaaaccacatgaaaataaaaaccatacataatag

SEQ ID NO: 1638 - DNA, 385 bp, Homo sapiens
ccatcttctctaaaacccaaattgcatgtgcactgagaaaaatgttactgcttcaaaacaaccaaaaatgggaaaataactgaagtctagaaacagattttctccttctagactcccagcgggctcggccagcagttccttattcaaaatcaatgtgtctataatcaactctagtatgtccacagttcacccaaatgccagatacattaagactaccaaatacaaacctaaaatgttccccccaaaatttcccttaaaactgttccccaatacctgcaattcacagatataatttagcatttttgtttttatatactaatttaggcaaaacccccccgccactgaatcgtccaacaaaaatgattaatttgatagaaacaaattt

SEQ ID NO: 1639 - DNA, 408 bp, Homo sapiens
aaaaaataaaattataaacaaaatacagaaaaatattgacacctgtgataacaaggaaatgactcttaagggcagtttgttgtcctgggggaaaaaatcataagtgttataaagaaatattattgtgcaaaggaggaatgtaatatttaaggttcatttacaacgggcatttggcgtcgacagaaaaagtctttctatgtatacattcaacattttgcagcatatttacattcaagttacatttccaaattctatgccaaatacagtctaactcaccatcaacaatccctcagatattactaaaatcctgtttatttggtaggagtgcaatattatcttattaggaaataattttatgttcctactaagtcaactgcatttttactactttaacaaaattcgctgaca

SEQ ID NO: 1640 - DNA, 472 bp, Homo sapiens
ctggtaccaataggaaagaagactccagctaatgaaaaagtagagattcaaaaacatgccacaggaaagaagtctccagcaaagagtcctaatcccagcacacctcgtgggaagaaaagaaaggctttgccagcatctgagaccccaaaagctgcagagtctgagaccccagggaaaagcccagagaagaagccaaaaatcaaagaagaggcagtgaaggaaaaaagtccttcgctggggaaaaaagatgcgagacagactccaaaaaagccagaggccaagtttttcaccactcctagtaaatctgtgagaaaagcttcccacacccccaaaaaatggcccaaaaaacccaaagtaccccagtcgacctaaagtcagtgattcaactggaaggaaacctcaatgctgcctccagagctttttggaaatactcagatcctggccgcctttgtaaccttctctaaacgtcagg

SEQ ID NO: 1641 - DNA, 520 bp, Homo sapiens
ccaagtcaaaattgggcccagcgtctttctttctgtcttatgacagaccagcctccagccttggtgtggtatctacatgtagccctgcgtaccctgcttctttttagcattcaaggcccactcagggcctcaaattagccaatggtgaatatggatataggacttttagagggatgcaggttgagttgtacataacttagaggtgaagtgcaggtccgaaacagggctagactttggagaactgtaaaatggctcactgagcatgacagcatcaggacccctggagtggctttcaaacttaccttcttctgcaggctacttctggaaatccctaggacttaccagctttctgaacactgcgcatcatgggagggtgaagaggaaaaggggctagttaaaatcttgcttctactgtgggccgaactcaggaggagccctaaagctaagcccttgggcttgacagctctacttttcacctctaactaccactgtgccaatgagtgccgagtgccaagatcag

SEQ ID NO: 1642 - DNA, 322 bp, Homo sapiens
ctgaacacaagcaaaccttctcaggaggtgtctcctaccctcttattgttcctcttacgctctgctcaatgaaaccttcctcttgagggtcattttcctttctgtattaattataccagtgttaagtgacatatataagaactttgcacacttcaaatcagagcagtgattctctcttctctccccttttccttcagagtgaatcatccagactcctcatggataggtcgggtgttaaagttgttttgattatgtaccttttgatagatccacataaaaagaaatgtgaagttttcttttactatcttttcatttatcaagc

SEQ ID NO: 1643 - DNA, 491 bp, Homo sapiens
aaaattctgatctatgcataaaattcatttttatatcacggttaaatttagtacaaactataaaaatgttaacactgaagttttcaacagaagtctattaagatgccttagaaaaattaaacaacagcaagtcatttactgctatgaggttaatacataaagaaacattcacacattttactgaaattttcagtaaataactttagccataacacttataattaaaagttcaaaagttgtgtgtggctctacagcaattataatttgcaatgaaaacactaagccaaatctttttgagctgatcagaacaatcttagctacaaaattggctgaaatttgcaaaccttaaaaagaacaccaattgtgaatggaataggtatcataacttagcttaaagtggaagatggtaaaaactcgatgcttaagtctgaattgcacaaggaaaatattaggggaaaaaacactcagctattactgatagctattacttt

SEQ ID NO: 1644 - DNA, 538 bp, Homo sapiens
  misc_feature (1)...(538): n = A,T,C or G
aaattattgttaaagaatacacaatttggggtattgggatttttctccttttctctgagacattccaccattttaatttttgtaactgcttatttatgtgaaaagggttatttttacttagcttagctatgtcagccaatccgattgccttaggtgaaagaaaccaccgaaatcccccaggtcccttggtcaggagcctctcaagattttttttgtcagaggctccaaatagaaaataagaaaaggttttcttcattcatggctagagctagatttaactcagtttctaggcacctnagaccaatcatcaactaccattctattccatgtttgcacctgtgcattttctgtttgcccccattcactttgtcaggaaaccttggcctctgctaaggtgtatttggtccttgagaagtgggagcaccctacagggacactatcactcatgctggtggcattgtttacaagctagaaagctgcactggtgctaatgccccttggggaaatggggctgtgaggaggaggattataacttagg

SEQ ID NO: 1645 - DNA, 379 bp, Homo sapiens
  misc_feature (1)...(379): n = A,T,C or G
aaatagtagagacggggtcttgttatgttccacaggctggtcttgaactcctgggaccaagcaatcctcccacctctgcctcccaaagtgctgggattataggtccaagtcaccacgcccggcctattttattccacttcggagaccgccccccttgtccctcagatgcatccaaatcaggagttagggatcatactccactgtggncctgaattatagaataatgaagtcctagatgtcagcggcccctggctgcatgatagtaagagtatggctgagcctgtcttgcagatcatccagtacctgtacaggccaggctacactgttctccagcactctctgtagccaagtgccagtaatcacagactaggctacctct

SEQ ID NO: 1646 - DNA, 545 bp, Homo sapiens
  misc_feature (1)...(545): n = A,T,C or G
aaaaagaattttttttgccctacaaactcatgaaaagaaacttcaccatcttttctcaaaaccaaacctagcaggctctagatggaaaaagtccagaaagcaactcacttgatatgatggaagacaacaaaggcatgtggtgataggctctccgttatccaagggaagccagcaatatgcgggcaggtcactggtgatgggctaggcatgtccaataataaacgagactcagggaatcagagaatcacaggattggaagggactttaagaatgatgatcaaattcatccctcaagcctttaanctccctttcaacatctctggcaaaggctctacactgtgtgttaaaaaaattccctggtatgggacatgcaaggaagacatcccattccaatttaggaccgatctaatttttagacactgctttcatgtgttaaacctaagtaggcttcttggtggaaaggagataatgcttaaaggcaaaaatacaagccacaaccctggagggttgacgtggttcttggttaagaaactgagctgaagttt

SEQ ID NO: 1647 - DNA, 308 bp, Homo sapiens
  misc_feature (1)...(308): n = A,T,C or G
ctgaggttgtcagtacaatgaaaccaaactggcgggatggaagcagattattctgccatttttccaggtctttgagttgcacgtcaaatctggggctgatcaccccacacttgtttagcctgcctgtgaggttcacaacaattttcccagctctgtggtcatcaatgatttcaaattcgncaatgtagccatgcttcatcatcacngtgagaaaccggacgatgactttggagcacggcctaataagcacctggcgtttgcctctcttttggngcattgttgatactcttgagagcagctgccaggac

SEQ ID NO: 1648 - DNA, 144 bp, Homo sapiens
gttcttagacatgatcccaaaggcataatccacagaagaatccataaaagaaaaatttgtaaattggactttatcaaaattaaaaacttacttttttgagatggggtcatgctgtgttgtccaggctggagtgtggtggtaagt

SEQ ID NO: 1649 - DNA, 517 bp, Homo sapiens
aaaaggagaaaaaaaaaacctatacagtagtctttccttatgttcattgcacaaaatgagttctgcttttagaactttgacactcaatggttaattttacaatttaagattccaactttataaccttttttctactccaaaacacccttgtaaagtttttctttaggatggtgtaaaaaccagcatttctgcacaattcactggaatttttttctttgtaataaaaatctcttctctgtaaaaccaaaaacaaaacaaaacaaaacaaaacaaaaccaaaagaaaagtcctctacctatcatggtttctgcagctatgcatgtatttctgttttatagctgctttatagctacttcagactccagatctgctttaatgtgtataactgcatccacacgcagcagaatactcttacaatagcaacttggggaaagagatctggaaaaaaaaatacatgagtaccaggaaacaaacacggcccagtaaaatatgaggcaaaaatgcctacaatgagatg

SEQ ID NO: 1650 - DNA, 410 bp, Homo sapiens
aaatgggtaaagccatttacataatatagaaagatatgcatatatctagaaggtatgtggcatttatttggataaaattctcaattcagagaaatcatctgatgtttctatagtcactttgccagctcaaaagaaaacaataccctatgtagttgtggaagtttatgctaatattgtgtaactgatattaaacctaaatgttctgcctaccctgttggtataaagatattttgagcagactgtaaacaagaaaaaaaaaatcatgcattcttagcaaaattgcctagtatgttaatttgctcaaaatacaatgtttgattttatgcactttgtcgctattaacatcctttttttcatgtagatttcaataattgagtaattttagaagcattattttaggaatatatagg

SEQ ID NO: 1651 - DNA, 470 bp, Homo sapiens
  misc_feature (1)...(470): n = A,T,C or G
ctgcaccatttttnggatcatcttgatatcctgcatgggcattgggnaaatcttcagcttcttacagcacaggcgtagtacatttttctttcgcttcactttctcaatgaggtaggagaacaattcatcacaggcaccttccttgaggaacaggtctacgagcacctctactggaatgaagggctgctctgcctctgtgctcaaaccatctacttttcgcttctttgtcatgggctgagctgcttctggctctggaaatgagtacagactggccctgtttccagaccatacagtccagaagtcctgatgagagttcttccgtaaatccagcacttgaagtttccacctcctggggcgaacctcctgggcaaggagcacatcaagtccatcaagcacagctttgaaggtctccaggtgaagatgttgtcccttcatcagcactcccagagggaggcaggtgaagggccagg

SEQ ID NO: 1652 - DNA, 587 bp, Homo sapiens
  misc_feature (1)...(587): n = A,T,C or G
gtttctttagattcaagagtttcgccacctccgcagcaacctcggggttgtctgcctnaagtgctttcagttctcggacaatgtttccttgttttgtcacttcatccatcagcgcttgtatctgctgtggcttggctgttgtaacagtctctacaactgctggcttcggggacgtttttgcctggagaacaacaaagttatcaccagcaaccataaatatcccctaacctccagttttatacagcatctcagagggaaagtggttacctttaagtcgaaggtctcttctagttaagacaggaaagaaaaactgtaagtgaggaagcggcagggccaaaagatggaaagagtgatgggtgaggactacttagggaaattagggaagtgatgctgtggctgttgtggagcgagggcacagcctttagctttctcacctggccccctccaaagcgctgccttaaactttcaatctggtcattttccaatttttggaacaagggactgactgtgccaatctggtgtcctgctggtaaggtacacaggaagtttgtcagcaggatactgcaggctggaggtgggagctgcag

SEQ ID NO: 1653 - DNA, 271 bp, Homo sapiens
  misc_feature (1)...(271): n = A,T,C or G
acactccagaatatatggaaaanannaaacagcgtttgtttgaaaatttgcgcatgttacctcatgcacctggtgtccagatgcaagctattccagaagatgctgttcatgaagacagtggagatgaagatggagaagatccagacaagagaatttctattcgagcatcagacaagcggatagcttgtgatgaagaattctcagattctgaggatgaaggagaaggaggtcgaagaaangtggctgatcataagaaaggagcaaagaaagc

SEQ ID NO: 1654 - DNA, 191 bp, Homo sapiens
  misc_feature (1)...(191): n = A,T,C or G
gcaccatccgtctacttacctcccttcgggccaagcacacccaggagaactgtgagacctggggtgtaaatggcgagacgggnacttnggnggacatgaaggaactgggcatatgggagccattggctgngaagctgcagactcataagacagcagnggagacggcagccctgctacngcgaatngatgac

SEQ ID NO: 1655 - DNA, 82 bp, Homo sapiens
  misc_feature (1)...(82): n = A,T,C or G
gcctcttcattcctctcccancataacaatcgnggnaacagaatgcgactgctgatttaccgatgnatttaatgnaagtaaa

SEQ ID NO: 1656 - DNA, 288 bp, Homo sapiens
  misc_feature (1)...(288): n = A,T,C or G
aaaatcctttnaaaactgtttattatacaagtgagttttgagtgtntnatgggcttatcggtaggatttctggtagcgagcgcgggcaccaggacctccaaactttttggactcgcagcgacgagggtcagctaccagcagggtccggtcatactggatgaggatgtctttgatctccttcttggaagcctcatccacatatttctggtaataggccaccagggctttggagatggactgacggatagcataaatctgggccacgtgaccaccaccctttacacggac

SEQ ID NO: 1657 - DNA, 418 bp, Homo sapiens
  misc_feature (1)...(418): n = A,T,C or G
atcttattcatcagcctgctgaacagttcctttttcagagacatagataccatccaaaaatttcctgatatccttgtttttaactgttgtggcttgctgaatcaaagccgctgaatttgaaacaagctcaatgtcatttccttcaaggattaattcatctttctgggcttgagatactgaacaagcaacacctggtctcatccgaaccctgcggatgtatttttcacccaagaaatktcggatttcaacaagagacccattctcctggataacaacgttgatggggaagtgagcatacacagacctcatcttgtaacggaagcccagtgtaacacccttgatcatgttctgtacatgactacaaatagtccgaacggtagtcagttcctttctgttaccccaccatttgtcaacccgg

SEQ ID NO: 1658 - DNA, 352 bp, Homo sapiens
  misc_feature (1)...(352): n = A,T,C or G
acaggccactgttggtaagatctaaagcatgcagtangnaaacaaaattgataaatattgagtgtgagtaattgggattggggagattgtggcaaactagaggggaagtgcccattgtaaaaacacatccacagacagtccaggcactaaggctgaatgggatcagggtatccagaaatctcaggatctccagggccatgttactgttaggtcaaggtcactggtgcagcaacgaatgtagtttttctagattcctctccctccctgggctctttacctaatgtctttgcggcacaggcggtaaccctgggagtaaagaggtgtggtccaaggaagtagcttttgtgaccag

SEQ ID NO: 1659 - DNA, 579 bp, Homo sapiens
cattgtgtcaaagagtgtgccaatctatttttgtttcagcattggaagtgcactttcccctggggcgtgtgggtgtgtgaatgtgcaagtgtctgagagatactgcatcagccctagacccccagagccagtcccgccctttacagagcagcccttagcctggggccatgggtcaggctgaccttcaacaattatttctagatgatttctggataagaattgctctctcggtaccagacagtttgacatcctccacccttagaaaatgactgacattgttttgttactgctcctacccaccaaggggataaagaaggcgagttctgagtgttggatgagtcagtcgcgtggaaggacgtggagcgtggcgctctgtaacttcctgccgtctgccaccccgccacgtgtatttaaccctcgcactttctccactgtggagatggctggggcggcgccccacagtgtgtattcctgtcctctatgttagagtgcatcagaagcacatttactgtgctatctatatctctatataaaagtgttttataaaaacccagaataggagcacgacgcatgattggt

SEQ ID NO: 1660 - DNA, 269 bp, Homo sapiens
  misc_feature (1)...(269): n = A,T,C or G
ctggcccacagcccnccctctcccaggcccgagatgtgacccaccngtntcttctgtnaantcgttagctttaatcaatcatgccctgccttgtccctctcactccccagccccacccctaagtgcccaaagtggggagggacaagggattctgggaagcttgagcctcccccaaagcaatgtgagtcccagagcccgcttttgttcttccccacaattccattactaaggaaacacatcaaataaactgactttttccccccaaaaaa

SEQ ID NO: 1661 - DNA, 383 bp, Homo sapiens
  misc_feature (1)...(383): n = A,T,C or G
ccaggctggtctcagnactcctgacctcaagtgatctgcttgcttcagcctcccgaagtgctgtgatcgtaggtgtgagccactgtgcccagctacctcatcaattcttaatctataaaccatggataggcttcgggagaacccaagaaccaatgaaatctgttggtaagttttatgtgtgcggttttctacagagagggtcaacagcatgtatattttcaaagaagtctgtggtgcaaaagagagtttattgttagaagtccttgggcaatcaacttggaaaagggtggattgagaatgggggctgtctagatcaggataatgttgaatttgaccctcacttgaggcttttgtacagaggatgagaagacggtaaattcaag

SEQ ID NO: 1662 - DNA, 369 bp, Homo sapiens
  misc_feature (1)...(369): n = A,T,C or G
ccaagtcaaaatngggcccagcgtctntctttctgtcttatgacagaccagcctccagccttggtgtggtatctacatgtagccctgcgtaccctgcttctttttagcattcaaggcccactcagggcctcaaattagccaatggtgaatatggatataggacttttagagggatgcaggttgagttgtacataacttagaggtgaagtgcaggtccgaaacagggctagactttggagaactgtaaaatggctcactgagcatgacagcatcaggacccctggagtggctttcaaacttaccttcttctgcaggctacttctggaaatccctaggacttaccagctttctgaacacttgcgcatcatg

SEQ ID NO: 1663 - DNA, 304 bp, Homo sapiens
  misc_feature (1)...(304): n = A,T,C or G
acgttttgtgacaggnaataaaattttaagaattcttaagtctaagggacttgctcctgatcttcctgaagatctctaccatttaattaagaaagcagttgctgttcgaaagcatcttgagaggaacagaaaggataaggatgctaaattccgtctgattctaatagagagccggattcaccgtttggctcgatattataagaccaagcgagtcctccctcccaattggaaatatgaatcatctacagcctctgccctggtcgcataaatttgtctgtgtactcaagcaataaaatgattgttt

SEQ ID NO: 1664 - DNA, 361 bp, Homo sapiens
  misc_feature (1)...(361): n = A,T,C or G
aaaaagtattctagcncaagatttttctgtaaactagattatgttgtaaacttttttctaaatcttgtaggagtgtcngttgttaagaactagagcttattcctattccaaatctatcttgcgctcctgaaaaactgcagaaaggcacttgaaagctgtttctttaagatatggatttcttttttattcttgctggtaatatattgctgcactgagtgtgtgcaatttttattcaaggncatcgtgatgctgagaagtttcgttgataacctgtccatctctagtttcaacccgcttaatcagaangtgccctttttgagtgggtatcaaccaganggagtgaaaccagattagttctaaa

SEQ ID NO: 1665 - DNA, 176 bp, Homo sapiens
  misc_feature (1)...(176): n = A,T,C or G
aaaatggtttctataaagggttttattgtatgaaatanaactttatatttttgcatatgtatagatagtaattatatttaatgtataactatagcattatggtgagtggaatttgacattgtccaaacctttttcatttttgagtgattaaaaatgaaatgtcctttgtnaaaaaa

SEQ ID NO: 1666 - DNA, 397 bp, Homo sapiens
  misc_feature (1)...(397): n = A,T,C or G
ccttcacagcgctcctgtaccctttaattgtgtgtctttctcacagctatccgtcagtccatctccaaagccccggtggcctattaccagaaatgtgagtgagcatgggtccttcccatgaggtaggtgggtgtgtggggatcaagtcaaggactctgtgtgattatctaaatcctcgtccctgctcttcttgccagatgtggatgangcttncaagaaggagatcaaagacatcctcatccagtatgaccggaccctgctggtagctgaccctcgtcgctgcgagtccaaaaagtttggaggccctggtgcccgcgctcgctaccagaaatcctaccgataagccccatcgtgactnaaaactcacttgtataataaacagtttttgagggatttt

SEQ ID NO: 1667 - DNA, 282 bp, Homo sapiens
ctggtgctgctgggaggccagcctggaagaggcagcagtggctcaagtttgcgtgcaggagccagagtgggacccacgggctcttgtgggtgtggtttagaactagatggtgctttggggacaagccatccaaaaaccccaggcccacatccaccctgatttgatatcccacttcctgacagatcagaggctgtgtctttaggcagtggaggtccaggagcagagcctggggctggttcacagctaaacccctccttagggcagcccagagtagggcctcag

SEQ ID NO: 1668 - DNA, 308 bp, Homo sapiens
ctggttccatagactacattagtgtgtttgatgtcaaatcaggcagcgctgttcataagatgattgtggacaggcagtatatgggcgtgtctaagcggaagtgcatcgtgtggggtgtcgccttcttgtccgatggcactatcataagtgtggactctgctgggaaggtgcagttctgggactcagccactgggacgcttgtgaagagccatctcatcgctaatgctgacgtgcagtccattgctgtagctgaccaagaagacagtttcgtggtgggcacagccgagggaacagtcttccattttcag

SEQ ID NO: 1669 - DNA, 472 bp, Homo sapiens
  misc_feature (1)...(472): n = A,T,C or G
cggccatcttagcggctgctgttggttgggggccgtsccgctcctaakgcaggaagatggtggccgcaaagaagacgaaaaagtcgctggagtcgatcaactctaggctccaactcgttatgaaaagtgggaagtacgtcctggggtacaagcagactctgaagatgatcagacaaggcaaagygaaattggtcattctcgctaacaactgcccagctttgaggaaatctgaaatacgagtactatgctatgttggctaaaactggtgtccatcactacagtggcaataatattgaactgggcacagcatgcggaaaatactacagagtgtgcacactggctatcattgatccaggtgactctgacatcattagaagcatgccagaacagactggtgaaaagtaaaccttttcacctacaaaatttcacctgcaaaccttaaacctgcaaaattttcctttaataaaatttg

SEQ ID NO: 1670 - DNA, 164 bp, Homo sapiens
gttcttagacatgatcccaaaggcataatccacagaagaatccataaaagaaaaatttgtaaattggactttatcaaaattaaaaacttacttttttgagatggggtcatgctgtgttgtccaggctggagtgtggtggtaagtcatagttcactgcagcctcg

SEQ ID NO: 1671 - DNA, 445 bp, Homo sapiens
aaaaaataaaattataaacaaaatacagaaaaatattgacacctgtgataacaaggaaatgactcttaagggcagtttgttgtcctgggggaaaaaatcataagtgttataaagaaatattattgtgcaaaggaggaatgtaatatttaaggttcatttacaacgggcatttggcgtcgacagaaaaagtctttctatgtatacattcaacattttgcagcatatttacattcaagttacatttccaaattctatgccaaatacagtctaactcaccatcaacaatccctcagatattactaaaatcctgtttatttggtaggagtgcaatattatcttattaggaaataattttatgttcctactaagtcaactgcatttttactactttaacaaaattcactgacatttttatcccagttgaagtcaagcctcttttagacat

SEQ ID NO: 1672 - DNA, 292 bp, Homo sapiens
ccttgaacacggattatccccaaacccttgtcatttcccccagtgagctctgatttctagactgctttgaaaatgctgtattcattttgctaacttagtatttgggtaccctgctctttggctgttctttttttggagcccttctcagtcaagtctgccggatgtctttctttacctacccctcagttttccttaaaacgcgcacacaactctagagagtgttaagaataatgttacttggttaatgtgttatttattgagtattgtttgtgctaagcattgtgttagattt

SEQ ID NO: 1673 - DNA, 130 bp, Homo sapiens
ccacagctaacatcattgcagcacctttactccttcggctttttgccagcaccaacattggcctttgcagtccccctgactttcttcattctgttcttgcgttcctttcgttgctttcttgaggtctttt

SEQ ID NO: 1674 - DNA, 611 bp, Homo sapiens
aaagagatttattaaatcatcttatcacaaagatggaaacatatacaaactagaaacatgcaaccatcatcttccacagtcaagtcacaatgtcaaatatttttcttgcctctgcagatgaaaagttcagatcttatacccaactacttactcaccccgaatatttaagtcagtcttcctgaaagtactcagggtagcaagtaacaaaatgcaaacgattatataaagaaagtgcagttaaaagggaaactatgtggcaagtaccctctttcccttcccaccccccaattaaaggcaaacaatggcactttgctcttgcttaacctagattgtcttcaaaaactattaaaatgtaaaagacttaacaaaaaaacaaaaagacgtttaacagatgtcaaaaagctccttagtgtttgaaaataaatgcttaaacaaaagacaacatattttatatcaaacaagtttgaagagccctgaattgcagcattctgtaacataaacaaacaaaaagctggtataggatttattgtcaaaggcagaatttcttcaggcaggtaagtaaggaggtggtggttctttttcaggcattttcacggccatttcataggttg

SEQ ID NO: 1675 - DNA, 558 bp, Homo sapiens
aaaaatatatggtcaggaggagactttacagtttctctttacaaacggtatataatgggagaaatggccttgtggcagaggacagtcccagacagcagccttgccacagctcaagtagacacagtccttactaagtctccacgaagagcagtagctggggagggcttctgatgctcttatttacaatcccacaatcactgctctccttcaagtctagcagtcccactgtatattgcaacttgatcgtactaaagaccgacagcaaaggatacagccagtctcgcctctgtgaagtgttgcagagaacctggagagtgctaatgaaaagctgttttaccaaaaagttgccacgggcaacctcatatacttaggcttatgtttagaaagagcaagggtgctactggtagacacttgaaattcgaagtgttttttgtgaataaaatgtgtttatggtaacttagggaaaagtcgtagtaggacagcaaacatgtggttctacatgtacatgaagttagacaagctgactcccctcctagaaagcctacctttcaggcacat

SEQ ID NO: 1676 - DNA, 498 bp, Homo sapiens
aaattgtattgaacagggcatataaaatgcattctgtaccctgatctggcatatagcttcaaaactgcagtggcgagtgtccatctcttagttagctaccttaactgtccacccttactacctgtgggatcgttgcctggtttgtcttctctgtgtcctggagcaaagccagttcctaaaactaaaactccattctagtcttgggaagaaaagtttctactcagaactggggaaggagtggaacttatgacttgggcctctaggctgtctctgtcccctcagctccccgacatgcatttactctctgccgtgggtctgcagtcgctgcaacctaccctctctctgcctcagccttacacccaagcagtaggtctgtgctctccctgtctctaggtcgctgagagaggtgcttttcttcataaaacctttggggtttggatttccccaggaagatggagaatggaatactcactcttgggtctaatctttccccttgac

SEQ ID NO: 1677 - DNA, 295 bp, Homo sapiens
  misc_feature (1)...(295): n = A,T,C or G
aaaatggaaacatcaattntattaacaatttacggcaatagacatttacagaacaaaaataagacagttccaagacaaaggagtgtaaaagtacagcacacaggttaatactcttcaccctcatcctctccgtcagcactatctgctccaacctcctcataatccttctcaagggcagccatgtcctcacgggcctctgaaaactcgccttcctccatccnctcacccacgtaccagtgaacaaaggcacgcttggcatacatcaggtcaaacttgtggtcnaggcgagcccagg

SEQ ID NO: 1678 - DNA, 136 bp, Homo sapiens; identical to SEQ ID NO: 77

SEQ ID NO: 1679 - DNA, 409 bp, Homo sapiens
ccaggctggttttgaactcctgacctcgtgatccacccgcctcagcctcccaaagtgctgggattacaggcgtgagccaccgcgcccggcaagaattcaaagttaaaacaggttaccactttcacctattaccatcaggttgcttatttttgttttatgttttttatttgtatgcatgtttactttatgtttcagtttactaccccctaaggcagcaagagagcaggaagataagcaaaatagagatgtttttgacaacttggcactgagagactatcctaagggaataatctgaaatacataaaaacattttattcacaaaattggtcatcacagcattatttacaatactgaaaatctggaaatagcctaaatttctaacaattgaaagaaggttaagtaaattata

SEQ ID NO: 1680 - DNA, 376 bp, Homo sapiens
  misc_feature (1)...(376): n = A,T,C or G
aaaacctttagcatttctgcctataatatttgggttttcttcttttcctatctttatttgataagtcccatcaaatattttccccataatcacaatgttttcttttcactttgctcaagaactgagttatgagctccaaatttggacaaactctacattggctaagttttagtcatttgcactgctaagaaagatgacaattcagcatgctgaagatgacttcctcccttataaaggggctaacacagagggcaatactgttcatgcttctgattcttgatcacaagaattgctttaggcaattacaatcatgtctcctctgacacatcatattattcaagtgagacaganaaagaagatgtcctatgtcacacag

SEQ ID NO: 1681 - DNA, 446 bp, Homo sapiens
ctggcattccttcgacttctctccagccgagcttcccagaacatcacatatcactgcaaaaatagcattgcatacatggatcaggccagtggaaatgtaaagaaggccctgaagctgatggggtcaaatgaaggtgaattcaaggctgaaggaaatagcaaattcacctacacagttctggaggatggttgcacgaaacacactggggaatggagcaaaacagtctttgaatatcgaacacgcaaggctgtgagactacctattgtagatattgcaccctatgacattggtggtcctgatcaagaatttggtgtggacgttggccctgtttgctttttataaaccaaactctatctgaaatcccaacaaaaaaaatttaactccatatgtgttcctcttgttctaatcttgtcaaccagtgcaagtgaccgacaaaattccagttc

SEQ ID NO: 1682 - DNA, 454 bp, Homo sapiens
ccaattgaaacaaacagttctgagaccgttcttccaccactgattaagagtggggtggcaggtattagggataatattcatttagccttctgagctttctgggcagacttggtgaccttgccagctccagcagccttcttgtccactgctttgatgacacccaccgcaactgtctgtctcatatcacgaacagcaaagcgacccaaaggtggatagtctgagaagctctcaacacacatgggcttgccaggaaccatatcaacaatggcagcatcaccagacttcaagaatttagggccatcttccagctttttaccagaacggcgatcaatcttttccttcagctcagcaaacttgcatgcaatgtgagccgtgtggcaatccaatacaggggcatagccggcgcttatttggcctggatggttcaggataatcacctgagcagtgaagccag

SEQ ID NO: 1683 - DNA, 589 bp, Homo sapiens
aaatatcacaagtaggtcttaagtgtcatctggcatcttctttctgtagccaggtaactcttagatcttattcatcagcctgctgaacagttcctttttcagagacatagataccatccaaaaatttcctgatatccttgtttttaactgttgtggcttgctgaatcaaagccgctgaatttgaaacaagctcaatgtcatttccttcaaggattaattcatctttctgggcttgagatactgaacaagcaacacctggtctcatccgaaccctgcggatatatttttcacccaagaaatttcggatttcaacaagagacccattctcctggataacaacgttgatggggaagtgagcatacacagacctcatcttgtaacggaagcccagtgtaacacccttgatcatgttctgtacatgactacaaatagtccgaacggtagccagttcctttctgttaccccaccatttgtcaacccggagcctcttttttttctttccaagaaggctgagttctacattgatgtgattgaagtccctccgcagggttcctctggggcccttcacgataactgtgcgtcccttcag

SEQ ID NO: 1684 - DNA, 460 bp, Homo sapiens
aaaaaataaaattataaacaaaatacagaaaaatattgacacctgtgataacaaggaaatgactcttaagggcagtttgttgtcctgggggaaaaaatcataagtgttataaagaaatattattgtgcaaaggaggaatgtaatatttaaggttcatttacaacgggcatttggcgtcgacagaaaaagtctttctatgtatacattcaacattttgcagcatatttacattcaagttacatttccaaattctatgccaaatacagtctaactcaccatcaacaatccctcagatattactaaaatcctgtttatttggtaggagtgcaatattatcttattaggaaataattttatgttcctactaagtcaacttgcatttttactactttaacaaaattcactgacatttttatcccagttgaagtcaagcctcttttagacaaagtcaatactaact

SEQ ID NO: 1685 - DNA, 362 bp, Homo sapiens
aaaaagtaaacacatgccttttgataaagcggaattgaggtgatcagaaattctgttgagaacccagctatttgtgtgagtatattttagctatcccaaaaactttttctgacctttctctttctgggataggatatgtgtgcttagagtatcattcagaagggtacctaatagttaatctgttaattagttacatcaggtttcaaatactaggtcagtgatatgagagcgagagagagagatttgaattgtcaaatgtattgtcagatgcattcacaagagcaggactgcttatctgttttgttcactactgtacccctagcatctaaatgaatacctagcccatagaataaacccactgg

SEQ ID NO: 1686 - DNA, 273 bp, Homo sapiens
gagagcgagctgagtggttgtgtggtcgcgtctcggaaccggtagcgcttgcagcatggctgaccaactgactgaagagcagattgcagaattcaaagaagctttttcactatttgacaaagatggtgatggaactataacaacaaaggaattgggaactgtaatgagatctcttgggcagaatcccacagaagcagagttacaggacatgattaatgaagtagatgctgatggtaatggacaattgcttcctgaatttctgcaatgatggaa

SEQ ID NO: 1687 - DNA, 460 bp, Homo sapiens
aaactccactgctgaccctgagtgcattcgctatcccctcacctattttgttttgggacaaagtctcgctctgtcacccaggctggagtgcagtggggcactctcagctcactgtaacctccacctcctgggttcaagcgattctcatgcctcagcctgccaaatagctgggattacaggcacatgccacaaagcccggctaatttttatattttttagtagagatggggtttcaccatgtcggccagcctggtctggaactcctggcatcaagtgatctacctgccttggcctcccaaagtgttgggattacaggtgtgagccaccacgcccggcccaagccagaggtcttgtaaggggactcatcccatcatgagggtcctaccctcgtgacctcatctaaacttcccttaccaaaggccccatctcaaataccatcacattgagggttaaggctcca

SEQ ID NO: 1688 - DNA, 390 bp, Homo sapiens
aaacacattttcacaagtttttgagacactggatttctttaattaaaaaaaaaatgccaagaaacattatttatacagggttgattgctttcatgttgttattctgtaccctatagtagcctccatgagaatctggtatttcttgctgcttggaactactttgcagtgattacttggttgcagtccaagtactctcgtttagtctgagcctggagatgttctagacttgcttctcccacctctgagattaggacaggaaaaatgtgaaatttcccaattacaggattatacggtaccatcacatcatttgtggaaattggggtgactgtatagctgggattgggctaaggactgtggtcttatctgtccacatacagccaaaatgcctat

SEQ ID NO: 1689 - DNA, 420 bp, Homo sapiens
aaaaatcattgtccaccaaaattttcaggactttggagttctcaaaaaaaaaatgtgtgtgtgtgtgtgtgtgtgttttaacacttccagcagttaaaaattaagaacacatatggataatcattggtggacgcctattataataaacagaaggaccacaaaaattaaaacaagttctaagaaccatcatatatacaaatttctgtacagaatgaggacaaaaacaattcacccaattaaaaccagctcttgtggtacacatactctttttcagaaaagaacgaacacttatcttcctgtattcatttgtttttccatttgattcagtattcttaatgctgtttccaccccataaattagtaactgttcaatagctgagaaatatcctattttcaattatgcaggggaaatcaggagctt

SEQ ID NO: 1690 - DNA, 437 bp, Homo sapiens
cttgaagtccagtgtttccacggctggatacctgtgtgtctccataaaagtcctgtcaccaaggacgttaaaggcattttattccagcgtcttctagagagcttagtgtatacagatgagggtgtccgctgctgctttccttcggaatccagtgcttccacagagattagcctgtagcttatatttgacattcttcactgtctgttgtttacctaccgtagctttttaccgttcacttccccttccaactatgtccagatgtgcaggctcctcctctctggactttctccaaaggcactgaccctcggcctctactttgtcccctcacctccaccccctcctgtcaccggccttgtgacattcactcagagaagaccacaccaaggaggcggccgctggcccaggagagaacacggggaggtttgtttgtgtgaaag

SEQ ID NO: 1691 - DNA, 488 bp, Homo sapiens
ctcagtgtccaagtccacagccaaattctggaagatatccatgtgtgctgagtgagtgatggtgctcattgaaggtcgctatctctttttgaatgcaattgcaaatcagctccggtacccaaatagccacactcactacttcagttgcaccatgctgtacctttttgcagaggccaatacggaagccatccaagaacagatcacaagagttctcttggaacggttgattgtaaataggccacatccttggggtcttcttattaccttcattgagctgattaaaaacccagcgtttaagttctggaaccatgaatttgtacactgtgccccagaaatcgaaaagttattccagtcggtcgcacagtgctgcatgggacagaagcaggcccagcaagtaatggaagggacaggtgccagttagacgaaactgcatctctgttgtacgtgtcagtctagaggtctcactgcaccgagttcataaactgact

SEQ ID NO: 1692 - DNA, 91 bp, Homo sapiens
aaaaggtattttgaataccattaaaactgcttttttttttccagcaagtatccaaccaacttgtttctgcttcaataaatctttggaaaaa

SEQ ID NO: 1693 - DNA, 396 bp, Homo sapiens
cctggccggaatactgatattctgtgccatgttgtcttttgactgacatcacccagttggtaaacttcactatcccctgatcgccacatctcattagttgctagagaaaatattgtgactggattttttccttccacctgtctcaagacagggtcctgacccactcgcccaagtaagtgcacacgattcagggatctttcaagaaccaaactggtagttgtttcggactcatgtcttacaaactgacgaagtacctgtaatacaggtcttcgaaacatggcttctattttcttttcttacagtctaatctttaggcttttcacagaaacacctcccgacccacgcaggatcacgcgcagccaaaacacacgactccagcacttccttcgcgctggc

SEQ ID NO: 1694 - DNA, 443 bp, Homo sapiens
aaatggtgtctttctatgttgcccagggtggtctcaaactcctgtgctcaagtgaccctcccacctcattctcaagtggctgcaattacaggcaaccagcctgacttaaaacagtatcttaaggtagatggtgattagcacatgtagtatgcttaacatttaatattataataagacatcacagcggctgtctcatgattaaggctgtgttcccttgttggtgaggaaattaattatgacttgataaatagaacatgttttaagaagtggctatatagctctggataaaacgaacaaaagaattagaattcctgcggggaatatatacaagactttatttagtcaagtaaaaaaaaatcactaatgtttaactgaagaaagagaaattgaataatatagttctatttcaacatgtgggttcacagatttattctaaccttcca

SEQ ID NO: 1695 - DNA, 381 bp, Homo sapiens
  misc_feature (1)...(381): n = A,T,C or G
ccacttaccctatccttaccctccttatcctcaaagtttgggctgatgtaagactagaggctggccctcccagataacagagaaaagggagccccaaatgcaaccaacctcttgttctattcttgcctgcaaaagaacagaggtttctcaaatgcctcagtccctgagagccatttcttcccctacatcgtctcactttgcttcctattgactgctggtagaaggagatttggggtaggggctagacctccttttatttgaagggggcaagggctgagatgtggtccccaaggggccagaaattcccaagttggtcacaggtggcttaanaagtgtgtggtatgggtttacggatttcctttgaagcctctcttcttctct

SEQ ID NO: 1696 - DNA, 620 bp, Homo sapiens
aaaaaataaagtagaacccagagaaaatgtcaaagctgccgccatgtagcaccagcaaccaattcttgcacttctcttccctgtctcagtaatcccctacagaaggttacatgattggaacaactctttcttccctgcaaagtctgctggtaccaggttataacctggacagtggagagtgtctgccttaggctggtttgtgcaagagggccaccttaggtctccttgaggacatttatcttggcgcagatcttgagggcagggcccagcttgatgttcatggcactcataagatgttcttctttaagtaataaaagggcctgtccatcaatctcctgtgagcgaaattcctctgcaatctcttggcagccttggagagaagcaataaactcgtacacctcctctacactccaacggctgggattactggacaggaacacagggttgatgccatgtaattccggtgtaggtggagctgtattgggattccccaggtcacgttctccatgcccagctcttactgataaaggcccaggagatgttggagagagtgcttcatcataactggaattatctgaaccccggctagagtcttcttgaccccggtggcacttgccctg

SEQ ID NO: 1697 - DNA, 513 bp, Homo sapiens
aaaaggatttttatctttcgtgataaactttgctgtgtaccaggaactataaaaacaaaaacttgttactaaagaaaatatctgaaatgtgataagttcttatgccatgttaatttcatgtgtcaacttcaacatttacatgtattatttcattatgtaaaatgttttagcaatttaatattttgcacagttagcaaactttgtatgtcatttccttcaaggcatcatgcagagttgacatgagatttataaggttttaagttgtttgcatgtgaaaatcaaatacatactttggtagtctttgaatacaaagtcatctgctcttgtttttcaagaattttgagacacaaagttgtatgtaaaggaatatattaatttgccgttttctaggtagatttgctcaaaaagagtgaatcaacttaatatgtacaaatgatagctgtgaaactgtagaatatctttgtgtcaggcttggagttcattgtgacctccaaattttgcctgaaggaccag

SEQ ID NO: 1698 - DNA, 398 bp, Homo sapiens
aaaattgtgtcaatatcttcagtgaactcttaacaatctggggaactgttttcctcaattaccacttcagcaacgttcatacgaaatcaaggcttgccttcatgtcagtgtcaggatcaactttaactcgaagagtttgtgcttgtctctaacatcttcagagtgagctttagggatgcctgaaggatggacagtacaagcaagcagctacttccatgatacagtgggaagataaaaaggcccattcagtccagccgtgacctgtaaatccagcttgccctccccccaccccactggaaaaaaaatccaaaacctttttccaccagttttttacatgtcgcttctctaccaggagattctttgcgtcatctagatgaacacactggacttatatacag

SEQ ID NO: 1699 - DNA, 283 bp, Homo sapiens
ccttaatgtaatacagcagaccactaggtattttagtactccacaaaccatggatttattcctaaactactccatgaacatgcaacctgaagacgtgtgaagatgagtgaaactgatattactcaatttcagtctggacactggctgaatccttcctctcccctcctcccatccctcataggatttttcttgtttggaaaccacgtgttctggtttccatgatgcccatccagtcaatctcatggagggtggagtatggttggagcctaatcagcgaggtttc

SEQ ID NO: 1700 - DNA, 265 bp, Homo sapiens
gttgcaggcaagaagcctgtggtaggtaagaaaggaaagaaggctgctgttggtgttaagaagcagaagaagcctctggtgggaaaaaaggcagcagctaccaagaaaccagcccctgaaaagaagcctgcagagaagaaacctactacagaggagaagaagcctgctgcataaactcttaaatttgattattccataaaggtcaaatcattttggacagcttcttttgaataaagacctgattatacaggcagtgagaaaaaaa

SEQ ID NO: 1701 - DNA, 630 bp, Homo sapiens
aaaaatataacacagtcaatataaacatgtactgggaattataaaccattctttcttctaagcactggatgagatactaaaaacatacagtatcttaccaatagccattaaaataggctaaaatgaaaaagaaaccgttgtaacaaggttactaatcccccaactttcaatgctgagttccttcatcatccatgtgcaatccagagatgacatctagcagggtggtaaaattattctggaaaatgccaactgtacttagacaaaataagttaattctatatggttgtccattaaagttttatgtggctatggttccactggagctaaaaattggcttttaactgtttccaaatcagaactagcagaggagagaagtaaataaagccaatggcactcccttcagaggctcaaaatggttagattttgatgcagatttaaccttagcgagtttcagtcagtccatttagatgatcctgtaggttcatacaaatacactgaaccgttggtttaacttctcttccttcctcaaagtttatgataaagagactcatccctgtattgggagtgactgacataagttcagatatgctcagagtggctggtaagggaacacttaagggcagtccagaa

SEQ ID NO: 1702 - DNA, 661 bp, Homo sapiens
  misc_feature (1)...(661): n = A,T,C or G
aaagagatttattaaatcatcttatcacaaagatggaaacatatacaaactagaaacatgcaaccatcatcttccacagtcaagtcacaatgtcaaatatttttcttgcctctgcagatgaaaagttcagatcttatacccaactacttactcaccccgaatatttaagtcagtcttcctgaaagtactcagggtagcaagtaacaaaatgcaaacgattatataaagaaagngcnnttaaaaaggnaactntnnggnaagnaccctntttnccttnccaccccccnattaaaggggnaacnatggcgctttgctnttgcttaaccnanattggcttcaaaaacnattaaaatgtgaaagactcttagcaaaaaaacaaaaagacgtttaacagatgtcaaaaagctccttagtgtttgaaaataaatgcttaaacaaaagacaacatnttttatatcaaacaagtttggagagccctgaattgcagcattctgtaacataaacaaacaaaaagctggtataggatttattgtcaanggcagaatttnttcaggcaggtaantaaggaggtggtggttctttttcaggcattttcacggccatttcataggttggcaaaacgtactgaggaggtgcttcaaaggcagggtacacagcaaat

SEQ ID NO: 1703 - DNA, 623 bp, Homo sapiens
aaaagatgtagataaaattttattaataacagaagacttaaaaaacattggaaatacttttttcaaatcccagaactgggagatggctattaaaaaatatgcagaagttttaagatacgtggacagttcaaaggctgttattgagacagcagatagagccaagctgcaacctatagctttaagctgtgtactgaatattggtgcttgtaaactgaagatgtcaaattggcagggagcaattgacagttgtttagaggctcttgaaatagacccatcaaataccaaagcattgtaccgcagagctcaaggatggcaaggattaaaagaatatgatcaagcattggctgatcttaagaaagctcaggggatagcaccagaagataaagctatccaggcagaattgctgaaagtcaaacaaaagataaaggcacagaaagataaagagaaggcagtatatgcaaaaatgtttgcttagaaaggattcagttttgcttattgtgtgttgattgtataaatgcaataagaaaatgtaaaggtttttgtctgtgaatatgatccctaatgtgtttcttttgacaccttagttccttactgtttacagtttaggagtactgataggggtt

SEQ ID NO: 1704 - DNA, 350 bp, Homo sapiens
aaatccttgaggggtacagcatcactcggattctgtgtccaatggccttagcaggaagattgcttcggaatttggcacgaaccatgccactgtttccatgggcccgagttacttttccccagatgactctggttttgtttggtttgccgccaggagtgactgtgttgttctttgctttatatacataagcgcatctcttgcccaaatagaattctgtttcatctcgggcgtaaacaccttcaattttaagaagagctgtgtgctccctttggttccggagaccccgcttatagccagcaaaaatggccttggaccacagccttccagacatagttccttttagaagtccc

SEQ ID NO: 1705 - DNA, 483 bp, Homo sapiens
tttttttatgacactggatttctttaattaaaaaaaaaaatgccaagaaacattatttatacagggttgattgctttcatgttgttattctgtaccctatagtagcctccatgagaatctggtatttcttgctgcttggaactactttgcagtgattacttggttgcagtccaagtactctcgtttagtctgagcctggagatgttctagacttgcttctcccacctctgagattaggacaggaaaaatgtgaaatttcccaattacaggattatacggtaccatcacatcatttgtggaaattggggtgactgtatagctgggattgggctaaggactgtggtcttatctgtccacatacagccaaaatgcctatccagaaatccagttcgttggaaaggaaaattggtactcctgtgccacaggggttccagaaaagggaagtcactttaccttgcggtggtgggatcctgatgtctttca

SEQ ID NO: 1706 - DNA, 460 bp, Homo sapiens
aaattcaaaacaggtatctcaaaaataaagttaatataggtttataagtaggacttgctcactcctgaaagtacgtttaagtaaatctccaaacacatttcaaatactctcagagagtctgttttatactaccaagtatcttatccacatttcttcaaaataaacaaaaaaatgctcacaaaatatctatgagaaacaagaagataaaatataaaatcttaatttttacgtataaaataaggaagccggtgaatagcaatgctagaaataaaatgctagatctcctaatccccttcccaagtttcatccagaaagataacagttaaaaaaaaagtaaataaaagcttaaaaaaatcccaaagtcatttcaaaaagaaaagcggctgcatcgtcttctgcaggttagaggtagtaaaggcggtttgacagtgacagatttggctctctgtgaatactctgg

SEQ ID NO: 1707 - DNA, 391 bp, Homo sapiens
aaaaaacattttacttggccgggcacggtggctcacacctgcaatcccagcactttgggaggccaaggcggggtggatcacaaggtcaggagttcaagaccaacgtgacgtgaccaatatggtgaaaccccatctctactaaaaatacaaaaattagctgggcgtggtggcacgtgcctgtaatcccagctacttgggaagctgaggcaggagaattgcttgaacccgggaggcagaggatgcagtgagccgagattgcgccaccgcactccagcctgggtgacagagcaagactccatctcaaagaaacaaacaaaaccactttacttactgtattgtgacatgtttattaagcatgaacccctatcagtactcctaaactgtaaacagt

SEQ ID NO: 1708 - DNA, 155 bp, Homo sapiens
  misc_feature (1)...(155): n = A,T,C or G
aaaaacactgtaaaattctaaatgattccttctgttgtaagttgatatatattngnaacctttgtgaaattgtattcatatgaaaatgtcagctcaaattcttgggagaacattaaattatgtaatatttaattaaaattttgaattcaaaaaaa

SEQ ID NO: 1709 - DNA, 511 bp, Homo sapiens
aacactagccatgtgacagtgctataaaactcccagtgtgcttttgtcaggggtgggtgggaggtgcctaattacccatacaagggcatcattcccactgggtatgcaggggcagaaccacagtagtaaattctaaaattatttcaagtatgttcgtataacggaaaatctcactggatggggccgttttaagaacgcttcttagtgatgatcctgtctgtgggacataaggaagaagcattgaaaggcactattttgaaagaatgctgcacaggtatggcaacagccccaagcacattccttcctcacgagtcccaggtccagctttattacctaatacaagtccaacctctggaacatccaaattcgctgttccaaagtttaattaaaaacacaatttacaaatatttaatatcttctgaaaagcatttctaagttaagaatgaaaaagtatgtacataatatataatcaaataccaggcagcctcaacttccaccaggtccacactca

SEQ ID NO: 1710 - DNA, 503 bp, Homo sapiens
aaatatgaaaaaccaaagggaagtgagtgggaagaggcaagagaggaaaggaactggagtttcttgggaagggactcccatgtctcccttcccatttatgggcttggggtctggggtacgaggctcacacagtgagtttgcagtgacacagctccttgtagatctgccgacgaagtttgggcatgtcctgctgggtgaagctgaatggctgagacagggccagatgcttgcagtacattttgaagtaacctttccagccctggtggaaatccagtcggtctttctttaccgcctctgcctgtagatacttggcaatatgcttagggcagcggcggtttagggtacgctgcgagtcaaaataggtgatggtgcgtcgcctcacatcaacagagatgagggaccaatgcacctccaggtggatggggattagcagtagctccttattgaagatgtccacgtttttggtccaccttttcaccccatcataacccttggtacggagt

SEQ ID NO: 1711 - DNA, 520 bp, Homo sapiens
  misc_feature (1)...(520): n = A,T,C or G
ctgatcttggcactnngcactcattggcacagtggtagttagaggtgaaaagtagagctgtcaagcccaagggcttagctttagggctcctcctgagttcggcccacagtagaagcaagattttaactagccccttttcctcttcaccctcccatgatgcgcagtgttcagaaagctggtaagtcctagggatttccagaagtagcctgcagaagaaggtaagtttgaaagccactccaggggtcctgatgctgtcatgctcagtgagccattttacagttctccaaagtctagccctgtttcggacctgcacttcacctctaagttatgtacaactcaacctgcatccctctaaaagtcctatatccatattcaccattggctaatttgaggccctgagtgggccttgaatgctaaaaagaagcagggtacgcagggctacatgtagataccacaccaaggctggaggctggtctgtcataagacagaaagaaagacgctgggcccaattttgacttgg

SEQ ID NO: 1712 - DNA, 382 bp, Homo sapiens
  misc_feature (1)...(382): n = A,T,C or G
aaaacttaattctcaccttgagtatgcaaaatacaaactccacaaaatgttcattttactttgtagtttacaaatatacaaaatagacgtttgcttaaatttatattacatatttattaaggcaaggaactatatagaaaaacacatttgttctgcttaaggcatacttgggaataaaccattgtacaaattattgcacatctgaaaccacagtgcataacagactgcataaaaatgctaaagaagtaaaccaggtatattacctgacttaggtcataaatgttgatcggaagacaaatatagattttccttgncaaagtatgcagcagttngaaaactttggcttccttgnttgggcctttagaaccaagactnaccaagc

SEQ ID NO: 1713 - DNA, 492 bp, Homo sapiens
ctgctgtttacttatcaaggttatagttcgtgcttctaactggagcactagctgctaatgcatatctagagaaaaaaatcttcctttgcagttagtgccaaaaggattcaaggcttgtctggctgcaaaatgagatttttatcaggcatcttgagcattattataaagcagatgacagtatcgtgtttggggtagtgaaattaaagcccataccaaagtgggccagccaagagcaggtgtcagcctgggacagatgtgaacaccaggaataaaagagcagttatgtaatccatttcgacgcacttctggaactgtaaactgtaaacaaatgctgcaaaggttaactattttctaaaacttacttttttccagtgggaaaacaaatatttggtatggtaacccaaacttatcactgcttttttgctcagtttcacacgttgtaactcaaattactctaaacgtgtttaactgccaaacagctacctgcatgtt

SEQ ID NO: 1714 - DNA, 410 bp, Homo sapiens
aaacatcttcaggaaatgcagggatcattttgtttggaattttaagacacaccagaacacatagtatttacaaagaaacttttacagatacattaattgaaaagataccatcaagaaatataattttgaaatctccctttcttgccaattgatcagaatgcaagatgagatgctaaccaaacagccctttagctgtcttgtatttccatacactaaatgtgtatttcagaaactgctcaaccatcagccaaatatcaacattagtgaaatgtgaaatgtaaccactgtgtaaaaagttaggcttctgaaacattaaaaacattacatccctggtctgcctttttacagaaagcacatttgttctcctagagctattcctatagttcattaattttctacatgaacatttt

SEQ ID NO: 1715 - DNA, 367 bp, Homo sapiens
  misc_feature (1)...(367): n = A,T,C or G
tttttttttttgatcctgccacaatatttttaattacgtacaaagatctgacatgtcacccagggacccatttcacccactgctctgtttggccgccagtcttttgtctctctcttcagcaatggtgaggcggataccctttcctcggggaagagaaatccatggtttgttgcccttgccaataacaaaaatgttggaaagtcgagtggcaaagctgttgccattggcatctttcacgtgaaccacgtcaaaagatccagggtgcctctctctgttggtgatcacaccaattcttcctaggttagcacctccagtcancatacacaggttaccagtgncgaacttgatgaaatcagtaatcttgcca

SEQ ID NO: 1716 - DNA, 652 bp, Homo sapiens
aaaaaataaaattataaacaaaatacagaaaaatattgacacctgtgataacaaggaaatgactcttaagggcagtttgttgtcctgggggaaaaaatcataagtgttataaagaaatattattgtgcaaaggaggaatgtaatatttaagattcatttacaacgggcatttggcgtcgacagaaaaagtctttctatgtatacattcaacattttgcagcatatttacattcaagttacatttccaaattctatgccaaatacagtctaactcaccatcaacaatccctcagatattactaaaatcctgtttatttggtaggagtgcaatattatcttattaggaaataattttatgttcctactaagtcaactgcatttttactactttaacaaaattcactgacatttttatcccagttgaagtcaagcctcttttagacaaagtcaatactaactcaaatgttgccagttataaaattatataataatcttttcctccctccttagagacagtattacaactttcaatgaaaggacaccagctatgataaattattttcttttacaagagttaggatgtattacagatacaaggttccagaattttaacttgttttcaaaagatggctgaagcacttttccctttcag

SEQ ID NO: 1717 - DNA, 52 bp, Homo sapiens
aaatgtgtatttcttaagaattcaaatttgtaataaaactatttgtataaaa

SEQ ID NO: 1718 - DNA, 338 bp, Homo sapiens
aaaacaggcacaatattctaaaggcatatgcattcaccatgggcttttgaatgtcctcactcccaacttcacaatcaaaatctacagaagcggcaaaagatcagagttcagagggctatttttttttccctttccttacttaaggttgcaaacacattgacagaggcaaaataaacacgtttcatagcagaaagaccaaaaaattgaatgtaaaccatagctctcccttgggagattacacaaatacaaggttcatctgtacttagaacaaggctcataacttcttgtagcatggacattcaacaggcacagagcaacaacattcacccaaataccag

SEQ ID NO: 1719 - DNA, 229 bp, Homo sapiens
aaaagtcaaagttagatcaagagaatatttcagagttttggtttacacatcaagaaacagacacacatacctaggaaagatttacacaatagataatcatcttaatgtgaaagatatttgaagtattaattttaatatattaaatatgatttctgttatagtcttctgtatggaattttgtcacttaagatgagctgcaaataaataataccttcaatggaaaaaaaaa

SEQ ID NO: 1720 - DNA, 510 bp, Homo sapiens
ccagtacaaaggcttataccagccagtttgtatcccttgtgatgtttgcccttatgatgtgtgatgatcggatctccatgcaagaaagacgcaaagagatcatgcttggattgaaacggctgcctgatttgattaaggaagtactgagcatggatgacgaaattcagaaactagcaacagaactttatcatcagaagtcagttctgataatgggacgaggctatcattatgctacttgtcttgaaggggcactgaaaatcaaagaaattacttatatgcactctgaaggcatccttgctggtgaattgaaacatggccctctggctttggtggataaattgatgcctgtgatcatgatcatcatgagagatcacacttatgccaagtgtcagaatgctcttcagcaagtggttgctcggcaggggcggcctgtggtaatttgtgataaggaggatactgagaccattaagaacacaaaaagaacgatcaaggtgccccactcagtggact

SEQ ID NO: 1721 - DNA, 637 bp, Homo sapiens
aaacttcatctctccaaagctccggtctttggctgtaccctcccagactagtacacatttgttggttttcttcacagcttcctcatcagactcctcatcatcatctccctttgtgttagatgtctgttcatcccactttatccgatgcagcataagacgcttaaatttcttctgggccttggggcccccttccactactaccacgttgacatccttgtgcagtaccaccacccctgtcaggtacagttgcccagcattggcttcaatcttgaacttcttggctgggttgctcaaatttcgaactctatatacagatatgtgtaccccctgtgaaatgtcttctttaagctttttaattttcttgacctttctctgttctgctgtgagttttcgggcagcgttggcctcttcatgcgctttctgtctttttgccatctgagctctgacgtgggcttctaccttcgtggggtcttgaacagcttctgttcctaatactcgcatcaaattagaaattctcactttgggttctggaggaggcatcaagcccagcctgactttttcttgtagttccttctgtgcttccctccttgtttgtctccgaagttttttctgttccttcttggtaagatatactccc

SEQ ID NO: 1722 - DNA, 267 bp, Homo sapiens; identical to SEQ ID NO: 436

SEQ ID NO: 1723 - DNA, 492 bp, Homo sapiens
cctagttccagtcccaacccaaccactattcagaatgagaatctaaaaagcatgacacataagcgaagccaacgttcaagttacacaaggctctccaaagatcctccggagctccatgcagcagcctcttctgagagcacaggctttggagaagaaagagaaagcattctttgagaaaaacaagcaaaggagaagagtgttactgtacccttatgacagaattgtcctggattttgactccatccacgcccatcacctttctacattttgctgacagataactaaccgatgatgaggccgaggtaaaagagacatctgcagtgtgacagaagggagcatgagaagcatggctcaccagccagcctctgtggtctttgtaattagaagcttcagaactcactaatactactgtacctttcattggcgcattaccccataaaactttttgagacgaggtgagatctgagtataaagataggtcagaagtatttt

SEQ ID NO: 1724 - DNA, 513 bp, Homo sapiens
ctgtacttcattcaaaaagccaaaatagagagtatacagtcctagagaattcctctatttgttcagatctcatagatgacccccaggtattgtcttttgacatccagcagtccaaggtattgagacatattactggaagtaagaaatattattataattgagaactacagcttttaagattgtacttttatcttaaaagggtggtagttttccctaaaatacttattatgtaagggtcattagacaaatgtcttgaagtagacatggaatttatgaatggttctttatcatttctcttccccctttttggcatcctggcttgcctccagttttaggtcctttagtttgcttctgtaagcaacgggaacacctgctgagggggctctttccctcatgtatacttcaagtaagatcaagaatcttttgtgaaattatagaaatttactatgtaaatgcttgatggaattttttcctgctagtgtagcttctgaaaggtgctttctccatttattt

SEQ ID NO: 1725 - DNA, 572 bp, Homo sapiens
  misc_feature (1)...(572): n = A,T,C or G
aaaggtatttgctcattggtctggcttagagacaggaagacatatgagcaataaaaaaaagattcttttgcatttaccaatttagtaaaaatttattaaaactgaataaagtgctgttcttaagtgcttgaaagacgtaaaccaaagtgcactttatctcatttatcttatggtggaaacacaggaacaaattctctaagagactgtgtttctttagttgagaagaaacttcattgagtagctgtgatatgttcgatactaaggaaaaactaaacagatcacctttgacatgcgttgtagagtgggaataagagagggctttttattttttcgttcatacgagtattgatgaagatgatactaaatgctaaatgaaatatatctgctccaaaaggcatttattctgacttggagatgcaacaaaaacacaaaaatggaatgaagtgatactcttcatcaaacagaagtgactgttatctcaaccattttgttaaatcctaaacagaaaacaaaaaaaatcatgacgaaaagacacttgcttattaattggcttggaaagtngaatatangag

SEQ ID NO: 1726 - DNA, 608 bp, Homo sapiens
aaatagtagagacggggtcttgttatgttccacaggctggtcttgaactcctgggaccaagcaatcctcccacctctgcctcccaaagtgctgggattataggtccaagtcaccacgcccggcctattttattccacttcggagaccgccccccttgtccctcagatgcatccaaatcaggagttagggatcatactccactgtggtcctgaattatagaataatgaagtcctagatgtcagcggcccctggctgcatgatagtaagagtatggctgagcctgtcttgcagatcatccagtacctgtacaggccaggctacactgttctccagcactctctgtagccaagtgccagtaatcacagactaggctacctctgctgggccagaaatagctgcctgaaccaggagctcacagcaccatccactctcatcaccaaagctatgcccaggagaagtcccacgctgctcacaatgaagcccacagcctcaaatatgaacttaggggcaaacactttccagaccatgagatgcctgcgaaggatggaggctgccaaggcacaggccagaatctgaataccaaggataaagaggtacttgaggcccag

SEQ ID NO: 1727 - DNA, 178 bp, Homo sapiens
  misc_feature (1)...(178): n = A,T,C or G
aaaaagtttaggtttaaactgtataattttgaatgcttaatgttgttgcttttgaataaagaaaagtacaaagtttttcatctaatcagttcctgcatatctgatgtactgtaatgcataaataatagatctttggtgtgataatttgtgaagcaataaagggcagagaaccngaaaa

SEQ ID NO: 1728 - DNA, 336 bp, Homo sapiens
aaaagaccaaatgtaggttgtcattatgttatatataattatagctttgtaggtatatgcattctccccgctctgttcaggttttcaagggtaaggtttagttcatataaataagcatttattgagtgcatactatgtgccaggtgctgtttatatggctgggtgtgcaatgatgaataaaacacagtccctgccttcaaggaccttacagactggtgagaatgtctgggagacagtgtgatcaaatgcctctgtagatgggtcttgcagtgagcttatcagggtgctgctgtgattagaggtggggagccttggattcttgagtaactctcactg

SEQ ID NO: 1729 - DNA, 325 bp, Homo sapiens
ccaatatggtgaaaccccatctctaataaaaatacataaattagccgggcgcagtagcatgcacctgtaatcccagctacctgggaggctgaggcaggagaattgcttaaacccgggaggcgaaggttgcagtgaaccgaggccacgccattgcactccagcctgggcgacagagcgagactccatgtcaaaaaagaaaataaataaataaaacttgttagaataaaaagtttagggattccccccgtcaatcctgtctgtacatatgagtgaattgagaggtctggaaacatacccacccactgttaacactgttgattttttt

SEQ ID NO: 1730 - DNA, 566 bp, Homo sapiens
aaacttacgccgcttatgtatttacacataaagttactgtatatataaaaaatattttcaaggactcatgggcttgggaatattcaaaagacattattgctacatttcaatatttacaaaaaaagccacaaaataatttcaaacattaagccactgcaaagaaacatctgatgtaagaaaaaattataaaaatataaactttcaagaatatccaagacaaaactctcaatgaagtgcccctgaagtacctagacatctataactaacaaccacttttcttactatcattgaagtcaatagaaacacaaaggaatttttcagacaaagtatggcaaacaacaatctcttgggtgacaacacaaccccaaaatctgttaactttggaaaggtgcgagagcatagaactccagtgcaaatggttacttccagataacggccacagttctctaaatgtagtctaagaaatgtagaagggggaaaccataaaggcaacatacctgaatctttcaagacaacacacaaactctgccatgtacacatttgccttttatattgggcagtgagga
